(19) United States
(12) Patent Application Publication
(10) Pub. No.: US 2012/0094855 A1
(43) Pub. Date: Apr. 19, 2012

(54) MEANS AND METHODS FOR DIAGNOSING PREDISPOSITION FOR TREATMENT EMERGENT SUICIDAL IDEATION (TESI)

(75) Inventors: Andreas Menke, Munich (DE); Elisabeth B. Binder, Munich (DE); Florian Holsboer, Munich (DE)

(73) Assignee: MAX PLANCK SOCIETY, Munich (DE)

(21) Appl. No.: 13/119,677

(22) PCT Filed: Sep. 7, 2009
(86) PCT No.: PCT/EP2009/061575

§ 371 Date: Sep. 30, 2011

(30) Foreign Application Priority Data
Sep. 18, 2008 (EP) 08016477.5
Mar. 12, 2009 (EP) 09003639.3

(51) Int. Cl. C40B 30/04; G01N 33/559; C12Q 1/68

(52) U.S. Cl. 506/9; 435/6.11; 204/456

(57) ABSTRACT

This invention relates to a method of diagnosing a predisposition for or the occurrence of treatment emergent suicidal ideation in an individual, the method comprising determining the presence or absence of one, more or all SNPs selected from the SNPs defined by SEQ ID NOs: 8, 18, 19, 47, 50, 52, 56, 64, 73, 86, 87, 92, 94, 95, 97 and 99.

[0001] This invention relates to method of diagnosing a predisposition for or the occurrence of treatment emergent suicidal ideation in an individual, the method comprising determining the presence or absence of one, more or all SNPs selected from the SNPs defined by SEQ ID NOs: 8, 18, 19, 47, 50, 52, 56, 64, 73, 86, 87, 92, 94, 95, 97 and 99.

[0002] In this specification, a number of documents including patent applications and manufacturer's manuals is cited. The disclosure of these documents, while not considered relevant for the patentability of this invention, is herewith incorporated by reference in its entirety. More specifically, all referenced documents are incorporated by reference to the extent as if each individual document was specifically and individually indicated to be incorporated by reference.

[0003] Major depression is a common psychiatric disease carrying a substantial loss of productivity and life quality and is associated with a significant morbidity and mortality with a suicide rate of about 15%^{1,2}. While antidepressants are the most effective treatment for depressive patients, there has been controversy if antidepressants, in particular serotonin reuptake inhibitors (SSRI) are implicated in the emergence or worsening of suicidal ideation³⁻⁵. Although treatment with antidepressants is associated with a significant reduction in suicides⁶⁻⁹ and was proven to have a suicide preventive effect¹⁰, there is some evidence that a subgroup of patients (about 5 to 15%) develop treatment emergent suicidal ideation (TESI) in the first weeks following treatment initiation and dose adjustments^{6, 11, 12}. In 2003, the Regulatory Agency of the British Department of Health warned physicians to avoid treatment with SSRI for depression in children and adolescents after studies showed an increase of agitation, hostility and suicidal behavior in this group^{13, 14}. This led to a public health advisory by the U.S. Food and Drug Administration (FDA) about the risk of suicidality in pediatric patients taking SSRIs for depression¹⁵. In 2005 the agency issued a black box warning and medication guide for a series of antidepressants (not only SSRIs) indicating that pediatric and adult patients may be at risk for this side effect. Recent studies showed a significant decrease in diagnosis and psychopharmacologic treatment of depressive episodes in children, adolescents but also adults following these warnings^{16, 17}. This was paralleled by an increase of suicide rates in the USA and the Netherlands between 2003 and 2005¹⁸ for the first time in a decade. Identification of a subgroup of patients at risk for treatment emergent suicidal behavior could therefore be critical to stop depriving patients of beneficial treatment options and to provide the risk group with closer monitoring.

[0004] While large family and twin studies estimate the heritability of suicidal behavior to be in the range of 30 to 55%^{19, 20}, no such formal evidence exists for TESI.

[0005] Markers for predicting the risk of developing TESI have previously been described; see for example US 2008/0102467. However, the markers described in this patent application deliver a significant number of false positives and false negatives when using them for predictive purposes and have not yet been replicated in an independent sample.

[0006] The technical problem underlying the present invention is the provision of alternative or improved means and methods for determining a predisposition for treatment emergent suicidal ideation in a patient.

[0007] Accordingly, this invention relates to a method of diagnosing a predisposition for or the occurrence of treatment emergent suicidal ideation in an individual, the method comprising determining the presence or absence of one, more or all SNPs selected from the SNPs defined by SEQ ID NOs: 8, 18, 19, 47, 50, 52, 56, 64, 73, 86, 87, 92, 94, 95, 97 and 99.

[0008] As discussed in more detail below, these 16 SNPs are the result from a double-filter procedure which has not been described in the art relating to the field of markers for treatment emergent suicidal ideation. More specifically, the 16 SNPs according to the main embodiment share the feature of being validated on a patient data set different from the training or discovery data set. To the inventors' best knowledge, such a set of validated SNPs for predicting or diagnosing TESI is not available in the art. The set of 16 SNPs is listed in Table 2 below.

[0009] The term “treatment emergent suicidal ideation (TESI)” is known in the art and designates the occurrence or enhanced occurrence of suicidal ideation in response to treatment, more specifically in response to treatment with anti-depressive drugs. To explain further, suicidal ideation may be a symptom of depressive disorders prior to beginning any therapy. A subgroup of patients (about 5 to 15%), however, develop and adverse response to treatment, the treatment being directed to an alleviation of the symptoms of depressive disorders, in that they develop or develop in enhanced form suicidal ideation upon the administration of anti-depressant drugs. While sufficient psychopharmacological treatment may eventually cure or at least alleviate this side effect, it is necessary to closely monitor those patients which have a predisposition to develop TESI. Moreover, the additional administration of anxiolytica and/or sedative medication is to be considered in such patients.

[0010] The term “predisposition” in relation to a disease has its established meaning in the art and is used accordingly here. To explain further, the term “predisposition” relates to the susceptibility to a disease that can be triggered under certain conditions. A person exhibiting a predisposition to a certain disease is not necessarily destined to develop the disease, but exhibits a risk to do so, wherein the risk exceeds the population average. As regards predisposition for TESI, the conditions which may serve as a trigger comprise, as explained above, the administration of anti-depressant drugs.

[0011] In addition to providing a method of diagnosing a predisposition for TESI, the main embodiment, in an alternative, provides a method of diagnosing the occurrence of TESI. While the former embodiment relates to patients which have not or have not yet developed TESI, the latter embodiment relates to patients which already suffer from TESI. The method of diagnosing the occurrence of TESI may be applied to the latter group of patients either as the only method of diagnosing TESI, or in conjunction with established methods of diagnosing TESI. When applying the method of diagnosing TESI according to the invention in conjunction with known methods of diagnosing TESI, the performance of the overall diagnostic method is improved. In particular, the number of falls positives and falls negatives is reduced.

[0012] The term “SNP” is well-known in the art and is shorthand for “single nucleotide polymorphism”. A SNP is a DNA sequence variation which is confined to a single position. Usually, polymorphisms are distinguished from mutations based on their prevalence. Sometimes a threshold of 1% prevalence in a population of individuals is considered for separating polymorphisms (more frequent) from mutations (less frequent). When present in an exon, and dependent on the occurrence of alternative splicing, the SNP may also be present in the mature mRNA. In the latter case, and depending on the degeneracy of the genetic code, a SNP may also be visible at the protein level. SNPs may furthermore be divided into SNPs occurring within a known locus, in the proximity of a known locus, and SNPs that are 5′ further away than 2 kb from the most 5′ feature of a gene and 3′ further away than 500 bases from most 3′ feature of a gene. Where applicable, loci where a SNP is located in and/or loci in the proximity of a SNP are indicated in the tables provided further below. Generally speaking, a SNP may or may not be associated with a certain phenotype, disease, or predisposition for a disease. The present inventors provide a plurality of SNPs, the association of which with TESI is disclosed herein for the first time.

[0013] SNPs are being annotated, collected and maintained in various databases including the SNP database of the National Centre for Biotechnology Information of the National Institutes of Health (NCBI), US. The SNPs according to the invention are referred to below by using “rs” identifiers as used in the SNP database of the NCBI, also known as “dbSNP”. More specifically, the rs identifiers refer to the dbSNP build 125, NCBI build 36.1/HG18. The SNP database of the NCBI is described in, for example, Sherry et al. (2001)²¹.

[0014] The SNPs according to the present invention are defined by the sequences comprised in the sequence listing. Generally speaking, a polymorphism may occur in at least two allelic forms, at least one of which may be referred to as the risk allele in those cases where an allelic form is associated with a disease or a risk to develop a disease. The sequences enclosed herewith and defining the SNPs of SEQ ID NOs: 1 to 100 throughout present the risk allele. In other words, presence of the respective sequence in a sample obtained from a patient is indicative of a risk to develop treatment emergent suicidal ideation. The respective allele which is not associated with a risk to develop TESI is indicated in the feature part of the respective entry of the sequence listing as “variation”. The relevant polymorphic position defining the SNP is the position indicated in the corresponding entries of Table 7. This position is located in the middle of the sequence of the respective entry of the sequence listing: This is position is position number 201; see also Table 7. In those cases where the sequence listing lists more than one variable position for a given entry, it is understood that the polymorphic position at position number 201 is intended for the purpose of the present invention.

[0015] While the respective entire sequence as presented in the sequence listing may be used to define the SNP according to the invention, it is also envisaged to use a subsequence of the sequence of the respective SEQ ID NO., said subsequence being, for example, 15, 17, 19, 21, 23 or 25 nucleotides in length and the variable position being located, for example, in the middle of the respective subsequence. Also subsequences consisting of an even number of nucleotides may be considered such as subsequences consisting of 16, 18, 20, 22 and 24 nucleotides, wherein the variable position may be, for example, one of the two central positions of the respective subsequence. The nucleobase characterizing the risk allele is furthermore presented in Tables 2 to 4. We note that the SNP as such is confined to the variable position itself. The length of the flanking sequence used for defining the SNP does not have any limiting effect, neither on the definition of the SNP nor on any specific method for determining presence or absence of the SNP, such methods being further detailed below. Preferably, the length of the flanking sequences is chosen such that a unique position in the genome is defined. This is why the SNP databases give preference to long flanking sequences. On the other hand it would equally be possible to define a SNP by (i) specifying the bases which may occur at the variable position and (ii) providing an “absolute” position on the given chromosome, for a given release of the sequence of the respective chromosome or genome.

[0016] The set of 100 SNPs defined by SEQ ID NOs: 1 to 100 has been obtained by determining SNPs associated with TESI in a first group of patients (also referred to as “discovery sample” herein). All 100 SNPs are characterized by statistically significant correlation with TESI and capability to predict TESI within this first group of patients. In a second step, a second group of patients has been considered. This second group represents an independent sample and is also referred to as “replication sample” herein. Each SNP of the set of 16 SNPs according to the main embodiment is characterized in that it correlates with TESI also in this second group in a statistically significant manner and is furthermore capable of predicting TESI in this second group of individuals.

[0017] To explain further, a discriminant analysis classifying patients using these 16 SNPs significantly associated with TESI in both a discovery and a replication sample revealed a 92% probability to classify TESI vs. non-TESI cases correctly in the discovery sample and a 85% probability in the replication sample. Specificity was 100% in discovery sample and 95% in replication sample, sensitivity was 72% in discovery sample and 50% in replication sample; see also Table 2 below. In Table 2, the performance of individual SNPs is also indicated.

[0018] The terms “discovery sample” and “replication sample” are commonly used in the art. The discovery sample is used for determining associations between polymorphisms and a phenotype such as TESI. The replication sample is an independent sample, i.e., a non-overlapping group of patients. It is used for validating the associations determined using the discovery sample. Examples of a discovery sample and a replication sample are disclosed in the Example.

[0019] In a preferred embodiment, the selected SNPs consist of or comprise the SNP defined by SEQ ID NO: 8. The SNP defined by SEQ ID NO: 8 is the SNP with the lowest p-value for the discovery group among the group of 16 SNPs according to the main embodiment.

[0020] In a further preferred embodiment, exactly 2, 3, 4, 5, 10 or 15 SNPs are used. When constructing subsets of 2, 3, 4, 5, 10 or 15 SNPs, preference is given to those SNPs which, when used alone, deliver the best prediction. Generally speaking, subsets of SNPs, i.e. in the present case subsets of less than 16 SNPs, exhibiting optimal predictive power on a given data set may be determined with tools known in the art when provided with the set of 16 SNPs according to the invention. Suitable tools are described in the Example enclosed herewith.

[0021] In another preferred embodiment, in addition to one, more or all SNPs selected from the SNPs defined by SEQ ID NOs: 8, 18, 19, 47, 50, 52, 56, 64, 73, 86, 87, 92, 94, 95, 97 and 99, one, more or all SNPs selected from the SNPs defined by SEQ ID NOs: 1 to 7, 9 to 17, 20 to 46, 48, 49, 51, 53 to 55, 57 to 63, 65 to 72, 74 to 85, 88 to 91, 93, 96, 98 and 100 are used. According to this embodiment, one, more or all validated SNPs may be used in combination with one, more or all SNPs as defined by the remaining 84 SNPs as comprised in the set of 100 SNPs as shown in Table 1.

[0022] In another preferred embodiment, instead of or in addition to a SNP as defined in any one of the embodiments above, a corresponding tagging SNP is used, wherein said tagging SNP is provided in Table 4. As discussed in more detail below, tagging SNPs are those SNPs which highly or fully correlate with a SNP as defined by any one of SEQ ID NOs: 1 to 100. The invention can be practiced by using one or more tagging SNPs instead of (or in addition to) one or more SNPs as defined herein above.

[0023] The present invention also provides a method of diagnosing a predisposition for or the occurrence of treatment emergent suicidal ideation in an individual, the method comprising determining the presence or absence of one or more SNPs selected from the SNPs defined by SEQ ID NOs: 1 to 100 in a sample obtained from a patient, wherein presence of the respective SNP(s) is/are indicative of said predisposition for or said occurrence of treatment emergent suicidal ideation, wherein said one SNP is or said more SNPs comprise the SNP defined by SEQ ID NO: 8. In a preferred embodiment of this method, said SNPs consist of or comprise the SNPs defined by SEQ ID NOs: 8, 18, 19, 47, 50, 52, 56, 64, 73, 86, 87, 92, 94, 95, 97 and 99.

[0024] Table 1 below presents the 100 SNPs according to the invention in the same order as they are presented in the enclosed sequence listing. More specifically, the SNPs are ordered according to the p-value. The p-value in this case is the likelihood that the observed association with TESI occurs by chance. The first column of Table 1 provides the database identifier of the respective SNP in dbSNP build 125. The corresponding sequences as presented in the enclosed sequence listing may also be retrieved from database NCBI build 36.1/HG18. The fifth column of the table presents the nucleobase present at the variable position in the risk allele. In addition to the sequence listing, also Table 7 presents the sequences of the SNPs of SEQ ID NOs:1 to 100.

TABLE 1
Table 1: Results from association analysis

| SNP | CHR | MAP | Gene | Risk allele | p-value |
|---|---|---|---|---|---|
| rs1630535 | 15 | 58297467 | | A | 1.3 × −7 |
| rs4724701 | 7 | 5495408 | #FBXL18 | A | 2 × 10−6 |
| rs1265235 | 6 | 4445680 | | A | 1.06 × −5 |
| rs2414660 | 15 | 58262633 | | T | 1.37 × −5 |
| rs12589623 | 14 | 47934734 | | A | 0.00002 |
| rs583338 | 18 | 39126230 | | G | 0.00003 |
| rs279542 | 3 | 9910772 | #IL17RE::2 | G | 0.00003 |
| rs279553 | 3 | 9909604 | #IL17RE::2 | G | 0.00003 |
| rs2774089 | 13 | 111885503 | | G | 0.00004 |
| rs1421780 | 5 | 174335276 | | A | 0.00005 |
| rs4907674 | 13 | 111900673 | | G | 0.00005 |
| rs7676106 | 4 | 190343908 | | C | 0.00006 |
| rs9949324 | 18 | 74181100 | | A | 0.00007 |
| rs4518023 | 20 | 39454182 | | A | 0.00008 |
| rs7704939 | 5 | 78109953 | #ARSB | A | 0.00008 |
| rs4544214 | 15 | 30719195 | #ARHGAP11A::2 | T | 0.00009 |
| rs6072343 | 20 | 39401601 | #LPIN3 | A | 0.00009 |
| rs965118 | 7 | 150809355 | #RHEB | A | 0.0001 |
| rs1109089 | 7 | 150800951 | #RHEB | G | 0.00011 |
| rs2980872 | 8 | 126486101 | | C | 0.00011 |
| rs2025949 | 13 | 92742277 | #GPC6 | G | 0.00012 |
| rs12142266 | 1 | 87070436 | | T | 0.00012 |
| rs9877859 | 3 | 112923378 | #PLCXD2 | C | 0.00012 |
| rs2070439 | 21 | 34933082 | | T | 0.00012 |
| rs12617566 | 2 | 167435454 | | A | 0.00013 |
| rs1958421 | 14 | 83249995 | | G | 0.00013 |
| rs9589698 | 13 | 92722965 | #GPC6 | C | 0.00013 |
| rs7645289 | 3 | 18047811 | | G | 0.00014 |
| rs2664537 | 20 | 39247142 | #ZHX3#PLCG1 | A | 0.00015 |
| rs2228246 | 20 | 39225477 | #PLCG1 | G | 0.00015 |
| rs2088138 | 17 | 44359721 | #SNF8#UBE2Z | T | 0.00015 |
| rs2839178 | 21 | 46503201 | #MCM3AP | A | 0.00016 |
| rs6500497 | 16 | 87338087 | #FLJ40448 | T | 0.00016 |
| rs11258903 | 10 | 14236785 | #FRMD4A | T | 0.00019 |
| rs2244057 | 14 | 61162625 | | C | 0.00019 |
| rs1459841 | 5 | 95936220 | | G | 0.0002 |
| rs7901463 | 10 | 59842383 | | C | 0.0002 |
| rs584762 | 11 | 31827333 | | C | 0.0002 |
| rs761453 | 11 | 31834575 | | A | 0.0002 |
| rs6035712 | 20 | 20773775 | | T | 0.0002 |
| rs554710 | 9 | 135171668 | | T | 0.00021 |
| rs6868846 | 5 | 59164510 | | A | 0.00021 |
| rs1013120 | 17 | 13485943 | | C | 0.00022 |
| rs649867 | 18 | 75501034 | | G | 0.00023 |
| rs6072317 | 20 | 39314930 | #ZHX3 | T | 0.00023 |
| rs4795069 | 17 | 30633359 | | A | 0.00026 |
| rs6948196 | 7 | 150844144 | #RHEB | T | 0.00029 |
| rs13403584 | 2 | 179550306 | | T | 0.00029 |
| rs7685314 | 4 | 190363247 | | A | 0.0003 |
| rs2662090 | 3 | 9066945 | #SRGAP3 | C | 0.0003 |
| rs6500498 | 16 | 87338145 | #FLJ40448 | G | 0.0003 |
| rs2074997 | 7 | 150805218 | #RHEB | G | 0.0003 |
| rs1204798 | 6 | 116650539 | #NT5DC1 | A | 0.00031 |
| rs12143647 | 1 | 228874868 | #COG2 | T | 0.00032 |
| rs3801033 | 7 | 6700627 | #ZNF12 | T | 0.00032 |
| rs10997044 | 10 | 67727448 | #CTNNA3 | A | 0.00035 |
| rs7350731 | 14 | 25179946 | | A | 0.00038 |
| rs9323737 | 14 | 83252414 | | G | 0.00038 |
| rs4881394 | 10 | 5103710 | | C | 0.0004 |
| rs4799159 | 18 | 74381450 | | A | 0.0004 |
| rs2270101 | 7 | 22902528 | | C | 0.00041 |
| rs356999 | 2 | 60665087 | | T | 0.00041 |
| rs618670 | 18 | 74187714 | | A | 0.00042 |
| rs7788668 | 7 | 22947162 | #DRCTNNB1A | A | 0.00045 |
| rs9332172 | 10 | 96721777 | #CYP2C9 | G | 0.00046 |
| rs902923 | 9 | 93373419 | | G | 0.00046 |
| rs4810622 | 20 | 45310632 | #PRKCBP1 | T | 0.00047 |
| rs6873640 | 5 | 123937398 | | C | 0.00047 |
| rs9302822 | 16 | 6482925 | #A2BP1 | A | 0.00047 |
| rs3753151 | 7 | 150815917 | #RHEB | C | 0.00051 |
| rs10490832 | 3 | 74427045 | #CNTN3 | G | 0.00052 |
| rs1545384 | 3 | 74434950 | #CNTN3 | A | 0.00052 |
| rs1884641 | 20 | 5987908 | #C20orf75 | G | 0.00052 |
| rs1958438 | 14 | 83230211 | | T | 0.00053 |
| rs4917639 | 10 | 96715524 | #CYP2C9 | C | 0.00054 |
| rs2279103 | 18 | 75574114 | #CTDP1 | T | 0.00057 |
| rs7307064 | 12 | 21525660 | #RECQL::2 | C | 0.00059 |
| rs6793017 | 3 | 2554126 | #CNTN4 | A | 0.00066 |
| rs523386 | 18 | 75628182 | | C | 0.00072 |
| rs1984151 | 6 | 94585819 | | T | 0.00076 |
| rs7719325 | 5 | 123500474 | | G | 0.00076 |
| rs1454333 | 4 | 92062152 | | A | 0.00078 |
| rs7146332 | 14 | 40847650 | | A | 0.00079 |
| rs11250017 | 8 | 10357428 | | C | 0.00079 |
| rs17175096 | 18 | 60871165 | | C | 0.00084 |
| rs2299965 | 7 | 150823594 | #RHEB | C | 0.00085 |
| rs2299967 | 7 | 150836143 | #RHEB | T | 0.00085 |
| rs720733 | 4 | 138216796 | | A | 0.00085 |
| rs635546 | 18 | 5927731 | | C | 0.00086 |
| rs7550277 | 1 | 239520957 | #RGS7 | C | 0.00086 |
| rs301191 | 3 | 177621532 | | A | 0.00089 |
| rs301193 | 3 | 177622218 | | C | 0.00089 |
| rs12583395 | 13 | 34117777 | | G | 0.00095 |
| rs1037448 | 11 | 60891107 | #CYBASC3 | T | 0.00096 |
| rs4939517 | 11 | 60883433 | #CYBASC3 | C | 0.00096 |
| rs4388301 | 6 | 138324067 | | C | 0.00096 |
| rs8095186 | 18 | 38167177 | | G | 0.00098 |
| rs1891877 | 10 | 23018034 | #PIP5K2A | C | 0.00098 |
| rs2348427 | 4 | 111633847 | #ENPEP | T | 0.00098 |
| rs9480684 | 6 | 107118917 | #RTN4IP1 | A | 0.00099 |

Best empiric associations calculated with Fisher Product Method over both allelic and genotypic tests with p < 0.001 and being significantly associated in both non-TESI comparison groups. The non-TESI comparison groups were 1) all individuals without increase in suicidality independent of baseline suicidality (no increase of the HAM-D item 3 over time; n = 329) and 2) a sub-group of 1), patients rating zero on item 3 throughout treatment (item 3 of the HAM-D = zero at allvisits; n = 79; see also example 1, Psychopathology and phenotype definition).
SNP: reference sequence identification number according to dbSNP;
CHR: chromosome number;
MAP: physical location of SNP on genome build HG18.

[0025] The SNPs according to the invention are characterized by a particularly high predictive value. As shown in the Example as well as in FIGS. 3 and 4 enclosed herewith, when using all 100 SNPs according to the invention, a perfect discrimination between risk patients and patients which do not exhibit a risk of developing TESI is achieved in the discovery sample.

[0026] The SNPs according to the invention are furthermore indicative of possible pathophysiological pathways relevant for TESI. Accordingly, they are indicative of candidate targets for therapeutic intervention. Genes encoding said candidate targets are indicated in Tables 1 to 4. It is of note that none of the genes harbouring the 16 SNPs have been associated with suicidality yet, however, regions around the genes RHEB, TMEM138 and CYBASC3 have been implicated with bipolar disorder in linkage studies. Of note is that 6 of 11 RHEB SNPs are associated with TESI, even if they are in high linkage disequilibrium. Most of the genes are involved in cell growth or organization (RHEB, ENPEP, TNNA3 and JAGN1); SRGAP3 is associated with neuronal signalling.

[0027] In a preferred embodiment, said SNPs consist of or comprise the SNPs defined by SEQ ID NOs: 8, 18, 19, 47, 50, 52, 56, 64, 73, 86, 87, 92, 94, 95, 97 and 99. This is the set of 16 validated SNPs as described above.

TABLE 2
Table 2: Best empiric associations calculated with allelic tests and being significantly
associated in both discovery and replication sample.

| | | | Gene | | | Discovery Sample | |
|---|---|---|---|---|---|---|---|
| | | | (Closest gene | | Risk | P value | P value |
| SNP | CHR | MAP | and distance) | Location | allele | FM Gr B | Group A |
| rs1037448 | 11 | 60891107 | TMEM138 | INTRONIC | T | 0.00096 | 1.48 × −5 |
| rs10997044 | 10 | 67727448 | CTNNA3 | INTRONIC | A | 0.00035 | 0.001 |
| rs1109089* | 7 | 150800951 | RHEB | INTRONIC | G | 0.00011 | 1.67 × −5 |
| rs1884641 | 20 | 5987908 | (C20orf755233) | INTERGENIC | G | 0.00052 | 0.01045 |
| rs2074997* | 7 | 150805218 | RHEB | INTRONIC | G | 0.0003 | 3.49 × −5 |
| rs2299965* | 7 | 150823594 | RHEB | INTRONIC | C | 0.00085 | 0.00013 |
| rs2299967* | 7 | 150836143 | RHEB | INTRONIC | T | 0.00085 | 0.00013 |
| rs2348427 | 4 | 111633847 | ENPEP | INTRONIC | T | 0.00098 | 0.00659 |
| rs2662090 | 3 | 9066945 | SRGAP3 | INTRONIC | C | 0.0003 | 0.00051 |
| rs279553 | 3 | 9909604 | JAGN1 | SYNONYMOUS_CODING | G | 0.00003 | 0.00077 |
| rs301193 | 3 | 177622218 | (N/A) | INTERGENIC | C | 0.00089 | 4.45 × −5 |
| rs4939517 | 11 | 60883433 | CYBASC3 | INTRONIC | C | 0.00096 | 1.96 × −5 |
| rs6948196* | 7 | 150844144 | RHEB | INTRONIC | T | 0.00029 | 3.13 × −5 |
| rs7788668 | 7 | 22947162 | (FAM126A- | INTERGENIC | A | 0.00045 | 0.00294 |
| | | | 2622) | | | | |
| rs8095186 | 18 | 38167177 | (PIK3C3 | INTERGENIC | G | 0.00098 | 0.00057 |
| | | | 251736) | | | | |
| rs965118* | 7 | 150809355 | RHEB | INTRONIC | A | 0.0001 | 7.1 × −5 |

| | Discovery Sample | | Replication Sample | | | |
|---|---|---|---|---|---|---|
| | P value | OR | P value | P value | P value | OR |
| SNP | Group B | Gr B | FM Gr B | Group A | Group B | Gr B |
| rs1037448 | 0.00093 | 3.3 | 0.035 | 0.012 | 0.035 | 1.8 |
| | | (1.6-6.8) | | | | (1.0-3.4) |
| rs10997044 | 0.00101 | 3.1 | 0.141 | 0.046 | 0.113 | 1.7 |
| | | (1.6-6.1) | | | | (1.0-3.3) |
| rs1109089* | 0.00011 | 3.5 | 0.041 | 0.004 | 0.03 | 1.7 |
| | | (1.8-6.6) | | | | (1.0-2.9) |
| rs1884641 | 0.00618 | 2.5 | 0.018 | 0.009 | 0.014 | 1.8 |
| | | (1.3-4.8) | | | | (1.0-3.0) |
| rs2074997* | 0.00024 | 3.2 | 0.041 | 0.003 | 0.032 | 1.6 |
| | | (1.7-6.0) | | | | (1.0-2.7) |
| rs2299965* | 0.00073 | 3.0 | 0.024 | 0.005 | 0.018 | 2.0 |
| | | (1.6-5.5) | | | | (1.1-3.5) |
| rs2299967* | 0.00073 | 3.0 | 0.019 | 0.003 | 0.018 | 2.2 |
| | | (1.6-5.5) | | | | (1.2-4.0) |
| rs2348427 | 0.00177 | 2.5 | 0.043 | 0.054 | 0.027 | 2.0 |
| | | (1.4-4.6) | | | | (1.2-3.3) |
| rs2662090 | 0.00026 | 3.2 | 0.041 | 0.105 | 0.037 | 1.8 |
| | | (1.7-6.1) | | | | (1.1-3.0) |
| rs279553 | 8 × −5 | 4.1 | 0.039 | 0.068 | 0.032 | 1.9 |
| | | (1.8-9.1) | | | | (1.0-3.4) |
| rs301193 | 0.00127 | 3.1 | 0.005 | 0.004 | 0.004 | 2.3 |
| | | (1.6-6.1) | | | | (1.3-4.3) |
| rs4939517 | 0.00093 | 3.3 | 0.079 | 0.01 | 0.056 | 1.7 |
| | | (1.6-6.8) | | | | (1.0-3.3) |
| rs6948196* | 0.00023 | 3.2 | 0.027 | 0.004 | 0.022 | 2.1 |
| | | (1.7-6.0) | | | | (1.1-3.7) |
| rs7788668 | 0.00096 | 2.8 | 0.052 | 0.04 | 0.042 | 1.7 |
| | | (1.5-5.1) | | | | (1.0-2.8) |
| rs8095186 | 0.00148 | 4.1 | 0.04 | 0.031 | 0.034 | 2.0 |
| | | (1.8-9.2) | | | | (1.0-3.9) |
| rs965118* | 8 × −5 | 3.6 | 0.055 | 0.005 | 0.044 | 1.7 |
| | | (1.9-6.7) | | | | (1.0-2.9) |

TESI positive: discovery n = 32; replication n = 42.
The non-TESI comparison groups were A) all individuals without increase in suicidality independent of baseline suicidality (no increase of the HAM-D item 3 over time; discovery n = 329; replication n = 434) and B) a sub-group of A), patients rating zero on item 3 throughout treatment (item 3 of the HAM-D = zero at all visits; discovery n = 79; replication n = 149; see also example 1, subsection entitled “Psychopathology and phenotype definition”).
SNP: reference sequence identification number according to dbSNP;
CHR: chromosome number;
MAP: physical location of SNP on genome build HG18. Allelic p-values are shown.
FM = Fisher Product Method over both allelic and genotypic tests.
*SNPs with LD > 0.8. OR = odds ratios based on comparison between cases and control group B.

[0028] The present invention furthermore provides a method of diagnosing a predisposition for or the occurrence of treatment emergent suicidal ideation in an individual, the method comprising determining the presence or absence of one or more SNPs selected from the SNPs defined by SEQ ID NOs: 1 to 100 in a sample obtained from a patient, wherein presence of the respective SNP(s) is/are indicative of said predisposition for or said occurrence of treatment emergent suicidal ideation.

[0029] In a preferred embodiment of the methods of the invention, exactly 2, 3, 4, 5, 10, 15, 16 or 18 SNPs are used.

[0030] In a further preferred embodiment, said one SNP is or said more SNPs comprise the SNP defined by SEQ ID NO: 1. This is the SNP being mentioned first in Table 1. When selecting subsets of SNPs, preference is given to subsets comprising SNPs with low p-values. P-values are indicated in Table 1.

[0031] In a further preferred embodiment, said SNPs consist of or comprise the SNPs defined by (a) SEQ ID NOs: 1, 3, 66 and 78; or (b) SEQ ID NOs: 1, 3, 6, 9, 21, 23, 29, 32, 38, 53, 55, 59, 61, 62, 66, 76, 78 and 94.

[0032] The set of four SNPs according to embodiment (a) has been shown to correctly predict a risk of developing TESI in 90% of the patients analyzed.

[0033] The set of 18 SNPs according to embodiment (b) provides correct predictions for 100% of the patients analyzed (see FIGS. 1 and 2 enclosed herewith). Table 3 provides a listing of the 18 SNPs characterized by SEQ ID NOs: 1, 3, 6, 9, 21, 23, 29, 32, 38, 53, 55, 59, 61, 62, 66, 76, 78 and 94. It is noteworthy that also this subset of 18 SNPs achieves the same discriminatory power as does the full set of 100 SNPs; see also FIGS. 1 and 2. When using the subset of 18 SNPs according to the invention or the respective subsequences thereof as defined herein above, individuals with 16 or more risk alleles are classified as TESI positive. When using 100 SNPs as defined by SEQ ID NOs. 1 to 100 or the respective subsequences thereof as defined herein above, individuals with 85 or more risk alleles are classified as TESI positive. Even single SNPs, in particular those with low P-values, allow excellent prediction.

TABLE 3
Table 3: Results from association analysis, subset with 18 SNPs

| | | | | Closest | Distance to | Risk | |
|---|---|---|---|---|---|---|---|
| SNP | CHR | MAP | Gene | gene | cl. gene | allele | P value |
| rs1630535 | 15 | 58297467 | | ANXA2P3 | −129157 | A | 1.3 × −7 |
| rs1265235 | 6 | 4445680 | | Q5G014 | −110164 | A | 1.06 × −5 |
| rs583338 | 18 | 39126230 | | SYT4 | 14801 | G | 0.00003 |
| rs2774089 | 13 | 111885503 | | C13orf28 | −193130 | G | 0.00004 |
| rs2025949 | 13 | 92742277 | GPC6 | | | G | 0.00012 |
| rs9877859 | 3 | 112923378 | PLCXD2 | | | C | 0.00012 |
| rs2664537 | 20 | 39247142 | ZHX3 | | | A | 0.00015 |
| rs2839178 | 21 | 46503201 | MCM3AP | | | A | 0.00016 |
| rs584762 | 11 | 31827333 | | PAX6 | 31249 | C | 0.0002 |
| rs1204798 | 6 | 116650539 | NT5DC1 | | | A | 0.00031 |
| rs3801033 | 7 | 6700627 | ZNF12 | | | T | 0.00032 |
| rs4881394 | 10 | 5103710 | | AKR1C3 | −22872 | C | 0.0004 |
| rs2270101 | 7 | 22902528 | | FAM126A | −47256 | C | 0.00041 |
| rs356999 | 2 | 60665087 | | BCL11A | 30951 | T | 0.00041 |
| rs902923 | 9 | 93373419 | ROR2 | | | G | 0.00046 |
| rs2279103 | 18 | 75574114 | CTDP1 | | | T | 0.00057 |
| rs6793017 | 3 | 2554126 | CNTN4 | | | A | 0.00066 |
| rs1037448 | 11 | 60891107 | TMEM138 | | | T | 0.00096 |

Best empiric associations calculated with Fisher Product Method over both allelic and genotypic tests with p < 0.001 and being significantly associated in both non-TESI comparison groups.
SNP: reference sequence identification number according to dbSNP;
CHR: chromosome number;
MAP: physical location of SNP on genome build HG18.

[0034] Subsets of SNPs, i.e. in the present case subsets of less than 100 SNPs, exhibiting optimal predictive power on a given data set may be determined with tools known in the art when provided with the set of 100 SNPs according to the invention. Suitable tools are described in the examples enclosed herewith.

[0035] As regards the means and methods for determining presence or absence of a given SNP, numerous suitable methods are known in the art. Any of these methods, either alone or in combination, may be used for determining presence or absence of one or more SNPs according to the invention in a sample. In a preferred embodiment, said determining is effected by allele specific hybridization, allele specific oligonucleotide ligation, primer extension, minisequencing, mass spectroscopy, heteroduplex analysis, single strand conformational polymorphism, denaturing gradient gel electrophoresis, microarray analysis, temperature gradient gel electrophoresis or combinations thereof.

[0036] To explain further, in allele specific hybridization a probe is used which is preferably strictly complementary to a region of the target nucleic acid comprising the SNP in question. Hybridization conditions are chosen which allow to distinguish between full complementarity and a single mismatch.

[0037] Allele specific oligonucleotide ligation is another method for detecting alleles that differ by a single base. A pair of oligonucleotide probes that hybridize to adjacent segments of the target nucleic acid are used. The oligomer on the 5′ side of the pair is an allele specific oligonucleotide in that it is strictly complementary to one specific allele of the target nucleic acid sequence, in the present case to the risk allele. The last base at the 3′ end of this oligonucleotide corresponds to the SNP. The oligomer on the 3′ side of the pair is the same for both different alleles. In case the risk allele is present, both oligonucleotides hybridize completely and are amenable to ligation with DNA ligase. In case the risk allele is not present, hybridization is not complete and no ligation is possible. Detecting the ligation product corresponds to detecting the risk allele. A variety of suitable detection schemes for the ligation product are known in the art.

[0038] In a primer extension assay according to the invention, nucleic acid comprised in the patient sample is hybridized to a primer complementary to the region adjacent to the SNP site. Dideoxyribonucleotides (ddNTPS) and DNA polymerase are added to the mixture and the primer is extended by a single nucleotide. The single nucleotide added is dependent on the allele of the amplified DNA. Primer extension biochemistry can be coupled with a variety of detection schemes, comprising fluorescence, fluorescence polarization (FP), luminescence and mass spectrometry (MS). Primer extension is sometimes also referred to as minisequencing.

[0039] Preferably, the hybridization of said primer to said nucleic acid is specific. Means of ensuring specificity of hybridization according to the present invention are known in the art and include stringent hybridization conditions. The term “stringent hybridization conditions”, as used in the description of the present invention, is well known to the skilled artisan. Appropriate stringent hybridization conditions for each sequence may be established by a person skilled in the art on well-known parameters such as temperature, composition of the nucleic acid molecules, salt conditions etc.; see, for example, Sambrook et al., “Molecular Cloning, A Laboratory Manual”; CSH Press, Cold Spring Harbor, 1989 or Higgins and Hames (eds.), “Nucleic acid hybridization, a practical approach”, IRL Press, Oxford 1985, see in particular the chapter “Hybridization Strategy” by Britten & Davidson, 3 to 15. Stringent hybridization conditions are, for example, conditions comprising overnight incubation at 42° C. in a solution comprising: 50% formamide, 5×SSC (750 mM NaCl, 75 mM trisodium citrate), 50 mM sodium phosphate (pH 7.6), 5×Denhardt's solution, 10% dextran sulfate, and 20 micrograms/ml denatured, sheared salmon sperm DNA, followed by washing the filters in 0.1×SSC at about 65°. Other stringent hybridization conditions are for example 0.2×SSC (0.03 M NaCI, 0.003M Natriumcitrat, pH 7) at 65° C.

[0040] Microarrays inter alia provide a miniaturized implementation of a plurality of allele specific hybridization assays in arrayed format. Microarrays for SNP detection are known in the art and available from a variety of manufacturers including Affymetrix. These microarrays include oligonucleotide microarrays.

[0041] In a further preferred embodiment, said treatment emergent suicidal ideation occurs or may occur in a patient being administered selective serotonin re-uptake inhibitors, selective noradrenalin re-uptake inhibitors, dual serotonin and noradrenalin re-uptake inhibitors and/or tricyclic antidepressants, and optionally being administered neuroleptics, mood stabilizers and/or benzodiazepines. As explained in the background section herein above, antidepressant drugs in general, and in particular selective serotonin reuptake inhibitors may be causative of TESI.

[0042] In a further preferred embodiment, said individual is a child or adolescent. As stated in the background section herein above, children and adolescents are considered to be particularly effected by drug induced TESI.

[0043] In a further preferred embodiment, said determining comprises isolating a nucleic acid from said sample.

[0044] Means and methods for isolating nucleic acids from a sample taken from an individual are well-known in the art²². Preferred samples according to the invention are samples comprising or consisting of body fluids. Generally speaking, body fluids are liquid components of living organisms. Preferred body fluids include blood, serum, saliva, semen, vaginal secretions as well amniotic, cerebrospinal, synovial, pleural, peritoneal and pericardial fluids. The term “nucleic acid” as used herein includes DNA such as cDNA or genomic DNA, and RNA. It is understood that the term “RNA” as used herein comprises all forms of RNA including mRNA, non-coding RNA, tRNA and rRNA. The term “non-coding RNA” in turn includes siRNA (small interfering RNA), miRNA (micro RNA), rasiRNA (repeat associated RNA), snoRNA (small nucleolar RNA) and snRNA (small nuclear RNA). A preferred RNA is mRNA.

[0045] The present invention also relates to a kit comprising (a) one or more agents suitable for determining presence or absence of two or more SNPs, said SNPs being defined by SEQ ID NOs: 1 to 100; and (b) optionally a manual with instructions for performing the method of the invention. Agents suitable for determining presence or absence of SNPs are well-known in the art^{23, 24}.

[0046] In a preferred embodiment of the kit according to the invention, said agents are selected from primers and probes for determining presence or absence of one or more SNPs of SEQ ID NOs: 1 to 100. Probes and primers may be used in methods such as allele specific hybridization, allele specific oligonucleotide ligation and primer extension as mentioned herein above.

[0047] In a further preferred embodiment, said more SNPs are at least 2, 3, 4, 5, 10, 15, 16, 18, 20, 30, 40, 50, 60, 70, 80, 90 or 100 SNPs.

[0048] Specific preferred sets of SNPs are those defined herein above. For example, a preferred set of SNPs is the set of SNPs defined by SEQ ID NOs: 8, 18, 19, 47, 50, 52, 56, 64, 73, 86, 87, 92, 94, 95, 97 and 99.

[0049] In preferred embodiments of the method or the kit of the invention, respectively, instead of or in addition to a SNP as defined in these claims, a corresponding tagging SNP is used, wherein said tagging SNP is provided in Table 4. Sequences of the tagging SNPs are presented in the sequence listing (SEQ ID NOs: 101 to 813).

TABLE 4
Table 4: Subset of 100 associated SNPs with tagged SNPs (r² > 0.8).

| | | Closest | distance to | |
|---|---|---|---|---|
| SNP | type | gene | gene | Tagged_SNP |
| rs1630535 | INTERGENIC | ANXA2P3 | −129157 | rs1872133 |
| | | | | rs1872132 |
| | | | | rs2054680 |
| | | | | rs336536 |
| | | | | rs163135 |
| | | | | rs12148406 |
| | | | | rs336528 |
| | | | | rs17270048 |
| | | | | rs17270055 |
| | | | | rs338446 |
| | | | | rs7182941 |
| | | | | rs7183074 |
| | | | | rs10851673 |
| | | | | rs12912083 |
| | | | | rs1680195 |
| | | | | rs16942291 |
| | | | | rs12148854 |
| | | | | rs8028748 |
| | | | | rs1680222 |
| | | | | rs1680221 |
| | | | | rs12899914 |
| rs4724701 | SYNONYMOUS_CODING | FBXL18 | 0 | rs7808325 |
| | | | | rs3801058 |
| | | | | rs7806101 |
| | | | | rs10216189 |
| | | | | rs4724699 |
| | | | | rs7799970 |
| | | | | rs4077245 |
| | | | | rs4560713 |
| rs1265235 | INTERGENIC | Q5G014_HUMAN | −110164 | rs1265237 |
| | | | | rs1265234 |
| | | | | rs7774098 |
| rs2414660 | INTERGENIC | ANXA2P3 | −163991 | rs338424 |
| | | | | rs2136559 |
| | | | | rs7165903 |
| | | | | rs7173200 |
| | | | | rs7173250 |
| | | | | rs900634 |
| | | | | rs7166014 |
| | | | | rs4775243 |
| | | | | rs2136557 |
| rs12589623 | INTERGENIC | N/A | −9 | rs1621025 |
| | | | | rs1769522 |
| | | | | rs11157633 |
| | | | | rs7158518 |
| rs279553 | SYNONYMOUS_CODING | JAGN1 | 0 | rs279558 |
| | | | | rs279542 |
| | | | | rs33970214 |
| rs279542 | 3PRIME_UTR | JAGN1 | 0 | rs279558 |
| | | | | rs279553 |
| | | | | rs33970214 |
| rs583338 | INTERGENIC | SYT4 | 14801 | rs816750 |
| | | | | rs310095 |
| | | | | rs310091 |
| | | | | rs310086 |
| | | | | rs310087 |
| | | | | rs310089 |
| | | | | rs618486 |
| rs2774089 | INTERGENIC | SOX1 | 111483 | rs2576497 |
| | | | | rs1946770 |
| | | | | rs100224 |
| | | | | rs188122 |
| rs1421780 | INTRONIC | Q6ZNE8_HUMAN | 0 | |
| rs4907674 | INTERGENIC | SOX1 | 126653 | |
| rs7676106 | INTERGENIC | LOC728856 | −48091 | rs9312392 |
| | | | | rs9312393 |
| | | | | rs7689338 |
| | | | | rs4241859 |
| | | | | rs4241860 |
| | | | | rs4241862 |
| | | | | rs4273547 |
| | | | | rs4282263 |
| | | | | rs6553287 |
| | | | | rs6820247 |
| | | | | rs10866319 |
| rs9949324 | INTERGENIC | N/A | −9 | rs9949519 |
| | | | | rs611509 |
| | | | | rs599612 |
| | | | | rs603942 |
| | | | | rs677233 |
| rs7704939 | 3PRIME_UTR | ARSB | 0 | |
| rs4518023 | INTERGENIC | CHD6 | −10401 | rs6065347 |
| | | | | rs4810317 |
| rs4544214 | UPSTREAM | ARHGAP11A | 46 | rs11632524 |
| | | | | rs8037818 |
| | | | | rs4643284 |
| rs6072343 | UPSTREAM | LPIN3 | −1372 | rs6065333 |
| | | | | rs16985655 |
| | | | | rs16985677 |
| rs965118 | INTRONIC | RHEB | 0 | rs17713386 |
| | | | | rs4726029 |
| | | | | rs875588 |
| | | | | rs1109089 |
| | | | | rs17713697 |
| | | | | rs2074998 |
| | | | | rs2074997 |
| | | | | rs17713890 |
| | | | | rs2299965 |
| | | | | rs2284264 |
| | | | | rs11772458 |
| | | | | rs2299967 |
| | | | | rs3789817 |
| | | | | rs758666 |
| | | | | rs736645 |
| | | | | rs4298422 |
| | | | | rs2374261 |
| | | | | rs12112989 |
| | | | | rs6980020 |
| | | | | rs12112134 |
| | | | | rs6948196 |
| | | | | rs6943752 |
| | | | | rs7794922 |
| rs1109089 | INTRONIC | RHEB | 0 | rs17713386 |
| | | | | rs4726029 |
| | | | | rs875588 |
| | | | | rs7805967 |
| | | | | rs17713697 |
| | | | | rs2074998 |
| | | | | rs2074997 |
| | | | | rs17713890 |
| | | | | rs2299961 |
| | | | | rs965118 |
| | | | | rs3753151 |
| | | | | rs2299965 |
| | | | | rs2284264 |
| | | | | rs11772458 |
| | | | | rs2299967 |
| | | | | rs3789817 |
| | | | | rs758666 |
| | | | | rs736645 |
| | | | | rs4298422 |
| | | | | rs2374261 |
| | | | | rs12112989 |
| | | | | rs6980020 |
| | | | | rs12112134 |
| | | | | rs6948196 |
| | | | | rs6943752 |
| | | | | rs7794922 |
| rs2980872 | INTERGENIC | TRIB1 | −25643 | rs2954006 |
| rs12142266 | INTERGENIC | SEP15_HUMAN | −30281 | |
| rs9877859 | INTRONIC | PHLDB2 | 0 | rs4682298 |
| rs2025949 | INTRONIC | GPC6 | 0 | rs7338831 |
| | | | | rs9561295 |
| | | | | rs9589698 |
| | | | | rs9523990 |
| | | | | rs9523991 |
| | | | | rs4142598 |
| | | | | rs9523998 |
| | | | | rs9561304 |
| | | | | rs956036 |
| | | | | rs1475449 |
| rs2070439 | INTERGENIC | RCAN1 | 23780 | |
| rs12617566 | INTERGENIC | XIRP2 | −32784 | |
| rs9589698 | INTRONIC | GPC6 | 0 | rs7338831 |
| | | | | rs9561295 |
| | | | | rs9523990 |
| | | | | rs9523991 |
| | | | | rs4142598 |
| | | | | rs9523998 |
| | | | | rs2025949 |
| | | | | rs9561304 |
| | | | | rs956036 |
| | | | | rs1475449 |
| rs1958421 | INTERGENIC | N/A | −9 | rs1958438 |
| | | | | rs10139321 |
| | | | | rs10132490 |
| | | | | rs10143458 |
| | | | | rs9671273 |
| | | | | rs1952534 |
| | | | | rs1958436 |
| | | | | rs11159605 |
| | | | | rs7359138 |
| | | | | rs1958435 |
| | | | | rs1958434 |
| | | | | rs1958433 |
| | | | | rs2149684 |
| | | | | rs2183203 |
| | | | | rs1958432 |
| | | | | rs2149683 |
| | | | | rs8010141 |
| | | | | rs1958430 |
| | | | | rs1958429 |
| | | | | rs1958428 |
| | | | | rs1958426 |
| | | | | rs1958425 |
| | | | | rs1958424 |
| | | | | rs1958423 |
| | | | | rs1958422 |
| | | | | rs10132081 |
| | | | | rs10132130 |
| | | | | rs10147226 |
| | | | | rs1958420 |
| | | | | rs10873350 |
| | | | | rs10140080 |
| | | | | rs9323737 |
| | | | | rs4545730 |
| | | | | rs1952530 |
| | | | | rs1952529 |
| | | | | rs12431659 |
| | | | | rs12434622 |
| | | | | rs10141403 |
| | | | | rs9323738 |
| | | | | rs9323739 |
| | | | | rs1952528 |
| | | | | rs1958418 |
| | | | | rs877800 |
| | | | | rs2372550 |
| | | | | rs1952545 |
| | | | | rs1952544 |
| | | | | rs10747302 |
| | | | | rs4899838 |
| | | | | rs11159610 |
| | | | | rs11159611 |
| | | | | rs7494095 |
| | | | | rs10132137 |
| | | | | rs4899839 |
| | | | | rs10135095 |
| | | | | rs2888357 |
| | | | | rs4143911 |
| | | | | rs1958458 |
| | | | | rs2372553 |
| | | | | rs10147836 |
| | | | | rs10139812 |
| | | | | rs1958456 |
| | | | | rs1958455 |
| | | | | rs2372523 |
| | | | | rs2372524 |
| | | | | rs10143348 |
| | | | | rs9323740 |
| | | | | rs10130591 |
| | | | | rs1958449 |
| rs7645289 | INTERGENIC | TBC1D5 | 290409 | rs4132218 |
| | | | | rs7627583 |
| | | | | rs9859212 |
| | | | | rs6790525 |
| | | | | rs4688898 |
| | | | | rs9861146 |
| | | | | rs2203242 |
| rs2088138 | 3PRIME_UTR | UBE2Z | 0 | |
| rs2228246 | N/A | N/A | −9 | |
| rs2664537 | 3PRIME_UTR | ZHX3 | 0 | rs2228246 |
| | | | | rs6072299 |
| | | | | rs6072302 |
| | | | | rs7261917 |
| | | | | rs6065325 |
| | | | | rs6072317 |
| | | | | rs6065326 |
| | | | | rs6072320 |
| | | | | rs6072321 |
| | | | | rs6072322 |
| rs6500497 | 3PRIME_UTR | Q8N7R2_HUMAN | 0 | rs7185630 |
| | | | | rs2242166 |
| | | | | rs2242164 |
| | | | | rs6500498 |
| rs2839178 | INTRONIC | MCM3AP | 0 | |
| rs11258903 | INTRONIC | FRMD4A | 0 | rs11258902 |
| | | | | rs10159816 |
| rs2244057 | INTERGENIC | HIF1A | −69366 | rs2253980 |
| | | | | rs2246928 |
| | | | | rs1006529 |
| | | | | rs698028 |
| rs1459841 | INTERGENIC | CAST | −87312 | |
| rs7901463 | INTERGENIC | TFAM | 12223 | rs10763541 |
| | | | | rs2081692 |
| | | | | rs7903523 |
| | | | | rs2101237 |
| | | | | rs2086784 |
| | | | | rs2393422 |
| | | | | rs1427219 |
| | | | | rs919166 |
| | | | | rs919167 |
| | | | | rs10826187 |
| | | | | rs10826188 |
| | | | | rs6481390 |
| | | | | rs7071862 |
| | | | | rs7896213 |
| | | | | rs7900673 |
| | | | | rs7916849 |
| | | | | rs10763545 |
| | | | | rs4948298 |
| | | | | rs4948299 |
| | | | | rs4948513 |
| | | | | rs2893777 |
| | | | | rs7084955 |
| | | | | rs7085387 |
| | | | | rs7073985 |
| | | | | rs7077653 |
| | | | | rs16912268 |
| | | | | rs10826193 |
| | | | | rs2114562 |
| | | | | rs2114563 |
| | | | | rs1013473 |
| | | | | rs2128909 |
| | | | | rs1030432 |
| | | | | rs10509091 |
| | | | | rs7077537 |
| | | | | rs4948301 |
| | | | | rs1125139 |
| | | | | rs1896248 |
| | | | | rs2114561 |
| rs584762 | INTERGENIC | PAX6 | 31249 | rs585972 |
| | | | | rs604518 |
| | | | | rs685428 |
| | | | | rs624732 |
| | | | | rs761453 |
| | | | | rs2440250 |
| | | | | rs594462 |
| | | | | rs687947 |
| | | | | rs2473858 |
| | | | | rs677874 |
| rs761453 | INTERGENIC | PAX6 | 38491 | rs585972 |
| | | | | rs604518 |
| | | | | rs685428 |
| | | | | rs624732 |
| | | | | rs584762 |
| | | | | rs2440250 |
| | | | | rs594462 |
| | | | | rs687947 |
| | | | | rs2473858 |
| | | | | rs677874 |
| rs6035712 | INTERGENIC | C20orf74 | 132505 | rs6047077 |
| | | | | rs6035711 |
| rs6868846 | INTERGENIC | hsa-mir-582 | 129225 | rs256353 |
| | | | | rs173945 |
| | | | | rs256348 |
| | | | | rs159608 |
| rs554710 | UPSTREAM | SURF6 | −15721 | |
| rs1013120 | INTERGENIC | HS3ST3A1 | 39975 | rs968026 |
| | | | | rs11078172 |
| | | | | rs12952261 |
| rs649867 | INTRONIC | Q8N7E7_HUMAN | 0 | |
| rs6072317 | INTRONIC | ZHX3 | 0 | rs6072268 |
| | | | | rs17264110 |
| | | | | rs6072269 |
| | | | | rs6072275 |
| | | | | rs6072286 |
| | | | | rs2228246 |
| | | | | rs6072299 |
| | | | | rs6072300 |
| | | | | rs6072302 |
| | | | | rs2664537 |
| | | | | rs7261917 |
| | | | | rs6065325 |
| | | | | rs6065326 |
| | | | | rs6072320 |
| | | | | rs6072321 |
| | | | | rs6072322 |
| | | | | rs8121001 |
| | | | | rs17181845 |
| | | | | rs6072338 |
| rs4795069 | INTERGENIC | SLFN5 | 14839 | |
| rs13403584 | INTERGENIC | CCDC141 | 92384 | rs10171173 |
| | | | | rs2200826 |
| | | | | rs10497528 |
| | | | | rs7574599 |
| | | | | rs6747725 |
| | | | | rs924800 |
| | | | | rs10930847 |
| | | | | rs1847420 |
| | | | | rs4894072 |
| rs6948196 | INTRONIC | RHEB | 0 | rs17713386 |
| | | | | rs4726029 |
| | | | | rs875588 |
| | | | | rs1109089 |
| | | | | rs7805967 |
| | | | | rs17713697 |
| | | | | rs2074998 |
| | | | | rs2074997 |
| | | | | rs17713890 |
| | | | | rs2299961 |
| | | | | rs965118 |
| | | | | rs3753151 |
| | | | | rs2299965 |
| | | | | rs2284264 |
| | | | | rs11772458 |
| | | | | rs2299967 |
| | | | | rs3789817 |
| | | | | rs758666 |
| | | | | rs736645 |
| | | | | rs4298422 |
| | | | | rs2374261 |
| | | | | rs12112989 |
| | | | | rs6980020 |
| | | | | rs12112134 |
| | | | | rs6943752 |
| | | | | rs7794922 |
| rs2662090 | INTRONIC | SRGAP3 | 0 | rs2670000 |
| rs7685314 | INTERGENIC | LOC728856 | −28752 | rs6820247 |
| | | | | rs7437007 |
| | | | | rs10866319 |
| rs2074997 | INTRONIC | RHEB | 0 | rs17713386 |
| | | | | rs4726029 |
| | | | | rs875588 |
| | | | | rs1109089 |
| | | | | rs7805967 |
| | | | | rs17713697 |
| | | | | rs2074998 |
| | | | | rs17713890 |
| | | | | rs2299961 |
| | | | | rs965118 |
| | | | | rs3753151 |
| | | | | rs2299965 |
| | | | | rs2284264 |
| | | | | rs11772458 |
| | | | | rs2299967 |
| | | | | rs3789817 |
| | | | | rs758666 |
| | | | | rs736645 |
| | | | | rs4298422 |
| | | | | rs2374261 |
| | | | | rs12112989 |
| | | | | rs6980020 |
| | | | | rs12112134 |
| | | | | rs6948196 |
| | | | | rs6943752 |
| | | | | rs7794922 |
| rs6500498 | 3PRIME_UTR | Q8N7R2_HUMAN | 0 | rs7185630 |
| | | | | rs2242166 |
| | | | | rs2242164 |
| | | | | rs6500497 |
| rs1204798 | INTRONIC | NT5DC1 | 0 | rs1204842 |
| | | | | rs1204843 |
| | | | | rs742930 |
| | | | | rs7770203 |
| | | | | rs1211388 |
| | | | | rs1204851 |
| | | | | rs1209221 |
| | | | | rs1204782 |
| | | | | rs1204783 |
| | | | | rs1204784 |
| | | | | rs1204785 |
| | | | | rs1204786 |
| | | | | rs1204788 |
| | | | | rs1204789 |
| | | | | rs1204794 |
| | | | | rs1204797 |
| | | | | rs1204799 |
| | | | | rs1204800 |
| | | | | rs1204801 |
| | | | | rs1204802 |
| | | | | rs1209223 |
| | | | | rs1204807 |
| | | | | rs1204814 |
| | | | | rs926829 |
| | | | | rs1204817 |
| | | | | rs1204818 |
| rs12143647 | INTRONIC | COG2 | 0 | rs4846999 |
| | | | | rs12564388 |
| | | | | rs1887492 |
| | | | | rs11122569 |
| | | | | rs11122570 |
| | | | | rs3736983 |
| | | | | rs12041242 |
| | | | | rs12045973 |
| rs3801033 | INTRONIC | ZNF12 | 0 | rs3801034 |
| | | | | rs7798471 |
| rs10997044 | INTRONIC | CTNNA3 | 0 | rs1876334 |
| | | | | rs10822782 |
| | | | | rs10822783 |
| | | | | rs1911479 |
| | | | | rs10997021 |
| | | | | rs10822784 |
| | | | | rs4609495 |
| | | | | rs4745897 |
| | | | | rs10762045 |
| | | | | rs10997032 |
| | | | | rs12763572 |
| | | | | rs10822791 |
| | | | | rs10762046 |
| | | | | rs10822792 |
| | | | | rs9804181 |
| | | | | rs10997035 |
| | | | | rs10997037 |
| | | | | rs10822794 |
| | | | | rs10762051 |
| | | | | rs12357109 |
| | | | | rs1911485 |
| | | | | rs1911486 |
| | | | | rs10997048 |
| | | | | rs10822801 |
| | | | | rs4523585 |
| rs7350731 | INTERGENIC | N/A | −9 | |
| rs9323737 | INTERGENIC | N/A | −9 | rs1958438 |
| | | | | rs10139321 |
| | | | | rs10132490 |
| | | | | rs10143458 |
| | | | | rs9671273 |
| | | | | rs1952534 |
| | | | | rs1958436 |
| | | | | rs11159605 |
| | | | | rs7359138 |
| | | | | rs1958435 |
| | | | | rs1958434 |
| | | | | rs1958433 |
| | | | | rs2149684 |
| | | | | rs2183203 |
| | | | | rs1958432 |
| | | | | rs2149683 |
| | | | | rs8010141 |
| | | | | rs1958430 |
| | | | | rs1958429 |
| | | | | rs1958428 |
| | | | | rs1958426 |
| | | | | rs1958425 |
| | | | | rs1958424 |
| | | | | rs1958423 |
| | | | | rs1958422 |
| | | | | rs10132081 |
| | | | | rs10132130 |
| | | | | rs10147226 |
| | | | | rs1958421 |
| | | | | rs1958420 |
| | | | | rs10873350 |
| | | | | rs10140080 |
| | | | | rs4545730 |
| | | | | rs1952530 |
| | | | | rs1952529 |
| | | | | rs12431659 |
| | | | | rs12434622 |
| | | | | rs10141403 |
| | | | | rs9323738 |
| | | | | rs9323739 |
| | | | | rs1952528 |
| | | | | rs1958418 |
| | | | | rs877800 |
| | | | | rs2372550 |
| | | | | rs1952545 |
| | | | | rs1952544 |
| | | | | rs10747302 |
| | | | | rs4899838 |
| | | | | rs11159610 |
| | | | | rs11159611 |
| | | | | rs7494095 |
| | | | | rs10132137 |
| | | | | rs4899839 |
| | | | | rs10135095 |
| | | | | rs2888357 |
| | | | | rs4143911 |
| | | | | rs1958458 |
| | | | | rs2372553 |
| | | | | rs10147836 |
| | | | | rs10139812 |
| | | | | rs1958456 |
| | | | | rs1958455 |
| | | | | rs2372523 |
| | | | | rs2372524 |
| | | | | rs10143348 |
| | | | | rs9323740 |
| | | | | rs10130591 |
| | | | | rs1958449 |
| rs4881394 | INTERGENIC | AKR1C3 | −22872 | rs4525119 |
| | | | | rs4881388 |
| | | | | rs10795234 |
| | | | | rs7074522 |
| | | | | rs10795241 |
| | | | | rs2096422 |
| rs4799159 | INTERGENIC | SALL3 | −459812 | rs185750 |
| | | | | rs2578210 |
| | | | | rs12456117 |
| | | | | rs7506508 |
| | | | | rs9952440 |
| rs356999 | INTERGENIC | BCL11A | 30951 | rs357003 |
| | | | | rs357002 |
| | | | | rs356998 |
| rs2270101 | INTERGENIC | FAM126A | −47256 | rs1001027 |
| | | | | rs1001026 |
| | | | | rs13227316 |
| | | | | rs11765548 |
| | | | | rs12700402 |
| rs618670 | INTERGENIC | N/A | −9 | |
| rs7788668 | DOWNSTREAM | FAM126A | −2622 | rs2286497 |
| | | | | rs2033670 |
| | | | | rs13227654 |
| | | | | rs11561822 |
| | | | | rs11764386 |
| | | | | rs10488277 |
| | | | | rs2286493 |
| | | | | rs2286491 |
| | | | | rs2286490 |
| | | | | rs11772725 |
| | | | | rs11772749 |
| | | | | rs11764613 |
| | | | | rs11768060 |
| | | | | rs17147527 |
| | | | | rs17147529 |
| | | | | rs11762669 |
| | | | | rs13225964 |
| | | | | rs11771543 |
| | | | | rs17370052 |
| | | | | rs9647996 |
| | | | | rs12674362 |
| | | | | rs13230424 |
| | | | | rs10950935 |
| rs902923 | INTRONIC | ROR2 | 0 | rs10991949 |
| | | | | rs768056 |
| | | | | rs1412466 |
| | | | | rs16907585 |
| | | | | rs7855644 |
| | | | | rs1492679 |
| | | | | rs2131301 |
| | | | | rs9409427 |
| rs9332172 | INTRONIC | CYP2C9 | 0 | rs17521564 |
| | | | | rs7893293 |
| | | | | rs2860905 |
| | | | | rs4086116 |
| | | | | rs4917639 |
| | | | | rs1934963 |
| | | | | rs4918797 |
| rs6873640 | INTERGENIC | ZNF608 | −56628 | |
| | | | | rs7725329 |
| rs9302822 | INTERGENIC | Q8N9J9_HUMAN | 114376 | rs17539244 |
| | | | | rs1019191 |
| | | | | rs17442566 |
| | | | | rs17442866 |
| | | | | rs8050684 |
| | | | | rs17540392 |
| rs4810622 | INTRONIC | ZMYND8 | 0 | rs4809630 |
| | | | | rs13038759 |
| | | | | rs761021 |
| | | | | rs6124987 |
| | | | | rs3803941 |
| | | | | rs6124990 |
| rs3753151 | INTRONIC | RHEB | 0 | rs17713386 |
| | | | | rs4726029 |
| | | | | rs875588 |
| | | | | rs1109089 |
| | | | | rs7805967 |
| | | | | rs2074998 |
| | | | | rs2074997 |
| | | | | rs17713890 |
| | | | | rs2299961 |
| | | | | rs2299962 |
| | | | | rs2299965 |
| | | | | rs2284264 |
| | | | | rs2299967 |
| | | | | rs3789817 |
| | | | | rs758666 |
| | | | | rs736645 |
| | | | | rs4298422 |
| | | | | rs2374261 |
| | | | | rs12112989 |
| | | | | rs6980020 |
| | | | | rs12112134 |
| | | | | rs6948196 |
| rs10490832 | SYNONYMOUS_CODING | CNTN3 | 0 | |
| rs1545384 | INTRONIC | CNTN3 | 0 | rs1809043 |
| | | | | rs2197742 |
| rs1884641 | INTERGENIC | C20orf75 | 5233 | rs6117052 |
| | | | | rs6076925 |
| rs1958438 | INTERGENIC | N/A | −9 | rs10139321 |
| | | | | rs10132490 |
| | | | | rs10143458 |
| | | | | rs9671273 |
| | | | | rs1952534 |
| | | | | rs1958436 |
| | | | | rs11159605 |
| | | | | rs7359138 |
| | | | | rs1958435 |
| | | | | rs1958434 |
| | | | | rs1958433 |
| | | | | rs2149684 |
| | | | | rs2183203 |
| | | | | rs1958432 |
| | | | | rs2149683 |
| | | | | rs8010141 |
| | | | | rs1958430 |
| | | | | rs1958429 |
| | | | | rs1958428 |
| | | | | rs1958426 |
| | | | | rs1958425 |
| | | | | rs1958424 |
| | | | | rs1958423 |
| | | | | rs1958422 |
| | | | | rs10132081 |
| | | | | rs10132130 |
| | | | | rs10147226 |
| | | | | rs1958421 |
| | | | | rs1958420 |
| | | | | rs10873350 |
| | | | | rs10140080 |
| | | | | rs9323737 |
| | | | | rs4545730 |
| | | | | rs1952530 |
| | | | | rs1952529 |
| | | | | rs12431659 |
| | | | | rs12434622 |
| | | | | rs10141403 |
| | | | | rs9323738 |
| | | | | rs9323739 |
| | | | | rs1952528 |
| | | | | rs1958418 |
| | | | | rs877800 |
| | | | | rs2372550 |
| | | | | rs1952545 |
| | | | | rs1952544 |
| | | | | rs10747302 |
| | | | | rs4899838 |
| | | | | rs11159610 |
| | | | | rs11159611 |
| | | | | rs7494095 |
| | | | | rs10132137 |
| | | | | rs4899839 |
| | | | | rs10135095 |
| | | | | rs2888357 |
| | | | | rs4143911 |
| | | | | rs1958458 |
| | | | | rs2372553 |
| | | | | rs10147836 |
| | | | | rs10139812 |
| | | | | rs1958456 |
| | | | | rs1958455 |
| | | | | rs2372523 |
| | | | | rs2372524 |
| | | | | rs10143348 |
| | | | | rs9323740 |
| | | | | rs10130591 |
| | | | | rs12894765 |
| | | | | rs7157077 |
| | | | | rs4904138 |
| | | | | rs1952541 |
| | | | | rs1958451 |
| | | | | rs12882544 |
| | | | | rs1958449 |
| | | | | rs1952538 |
| rs4917639 | INTRONIC | CYP2C9 | 0 | rs17521564 |
| | | | | rs7893293 |
| | | | | rs2860905 |
| | | | | rs4086116 |
| | | | | rs9332172 |
| | | | | rs1934963 |
| | | | | rs4918797 |
| rs2279103 | NON_SYNONYMOUS_CODING | CTDP1 | 0 | rs3809939 |
| | | | | rs8098133 |
| | | | | rs3859315 |
| | | | | rs3859316 |
| | | | | rs898619 |
| | | | | rs3809936 |
| | | | | rs3786235 |
| | | | | rs8087647 |
| | | | | rs8084175 |
| | | | | rs9953991 |
| | | | | rs9946977 |
| | | | | rs12605690 |
| | | | | rs554659 |
| | | | | rs551017 |
| | | | | rs665138 |
| | | | | rs523386 |
| | | | | rs652717 |
| | | | | rs496036 |
| | | | | rs576937 |
| | | | | rs621490 |
| rs7307064 | INTRONIC | RECQL | 0 | rs7307519 |
| | | | | rs7976409 |
| | | | | rs7976415 |
| | | | | rs7956315 |
| | | | | rs17627102 |
| | | | | rs7310464 |
| | | | | rs1061626 |
| rs6793017 | INTRONIC | CNTN4 | 0 | rs6763008 |
| | | | | rs6774320 |
| rs523386 | INTERGENIC | Q6ZVY3_HUMAN | 10572 | rs3809939 |
| | | | | rs8098133 |
| | | | | rs3859315 |
| | | | | rs3859316 |
| | | | | rs898619 |
| | | | | rs3809936 |
| | | | | rs3786235 |
| | | | | rs8087647 |
| | | | | rs2279103 |
| | | | | rs8084175 |
| | | | | rs9953991 |
| | | | | rs9946977 |
| | | | | rs12605690 |
| | | | | rs554659 |
| | | | | rs551017 |
| | | | | rs665138 |
| | | | | rs652717 |
| | | | | rs496036 |
| | | | | rs576937 |
| | | | | rs621490 |
| rs7719325 | INTERGENIC | ZNF608 | −493552 | rs17151230 |
| | | | | rs17151248 |
| rs1984151 | INTERGENIC | EPHA7 | 399827 | rs2325528 |
| | | | | rs9452447 |
| | | | | rs9294577 |
| | | | | rs2152543 |
| | | | | rs4707810 |
| | | | | rs6904831 |
| | | | | rs2000361 |
| | | | | rs7765999 |
| | | | | rs6925802 |
| | | | | rs9294582 |
| | | | | rs7752145 |
| | | | | rs1238901 |
| | | | | rs1219036 |
| | | | | rs1219037 |
| | | | | rs2248260 |
| | | | | rs2801552 |
| | | | | rs2801556 |
| | | | | rs2633619 |
| | | | | rs2801559 |
| | | | | rs1601856 |
| rs1454333 | INTERGENIC | TMSL3 | 82867 | rs17017774 |
| | | | | rs1377917 |
| rs11250017 | INTERGENIC | Q6ZVI4_HUMAN | −12575 | rs10095339 |
| | | | | rs10103466 |
| rs7146332 | INTERGENIC | LRFN5 | −298872 | rs8005889 |
| | | | | rs4128092 |
| | | | | rs7161171 |
| | | | | rs6572078 |
| | | | | rs3866730 |
| | | | | rs6572079 |
| | | | | rs8019332 |
| | | | | rs4128087 |
| | | | | rs11628088 |
| | | | | rs12892392 |
| | | | | rs1431032 |
| rs17175096 | INTERGENIC | N/A | −9 | rs12960630 |
| | | | | rs17260406 |
| | | | | rs17074095 |
| rs720733 | INTERGENIC | PCDH18 | −443488 | rs6825957 |
| | | | | rs1914603 |
| | | | | rs10857200 |
| | | | | rs10857201 |
| | | | | rs6825255 |
| | | | | rs6853959 |
| | | | | rs4864386 |
| rs2299965 | INTRONIC | RHEB | 0 | rs17713386 |
| | | | | rs4726029 |
| | | | | rs875588 |
| | | | | rs1109089 |
| | | | | rs7805967 |
| | | | | rs17713697 |
| | | | | rs2074998 |
| | | | | rs2074997 |
| | | | | rs17713890 |
| | | | | rs2299961 |
| | | | | rs965118 |
| | | | | rs3753151 |
| | | | | rs2284264 |
| | | | | rs11772458 |
| | | | | rs2299967 |
| | | | | rs3789817 |
| | | | | rs758666 |
| | | | | rs736645 |
| | | | | rs4298422 |
| | | | | rs2374261 |
| | | | | rs12112989 |
| | | | | rs6980020 |
| | | | | rs12112134 |
| | | | | rs6948196 |
| | | | | rs6943752 |
| | | | | rs7794922 |
| rs2299967 | INTRONIC | RHEB | 0 | rs17713386 |
| | | | | rs4726029 |
| | | | | rs875588 |
| | | | | rs1109089 |
| | | | | rs7805967 |
| | | | | rs17713697 |
| | | | | rs2074998 |
| | | | | rs2074997 |
| | | | | rs17713890 |
| | | | | rs2299961 |
| | | | | rs965118 |
| | | | | rs3753151 |
| | | | | rs2299965 |
| | | | | rs2284264 |
| | | | | rs11772458 |
| | | | | rs3789817 |
| | | | | rs758666 |
| | | | | rs736645 |
| | | | | rs4298422 |
| | | | | rs2374261 |
| | | | | rs12112989 |
| | | | | rs6980020 |
| | | | | rs12112134 |
| | | | | rs6948196 |
| | | | | rs6943752 |
| | | | | rs7794922 |
| rs7550277 | INTRONIC | RGS7 | 0 | rs11589937 |
| | | | | rs1110128 |
| | | | | rs6702310 |
| | | | | rs11583779 |
| | | | | rs11584248 |
| | | | | rs1996805 |
| | | | | rs11587158 |
| | | | | rs11584771 |
| | | | | rs10926454 |
| | | | | rs7539742 |
| | | | | rs6429256 |
| | | | | rs6684760 |
| rs635546 | INTERGENIC | L3MBTL4 | −16980 | |
| rs301191 | INTERGENIC | N/A | −9 | rs177295 |
| | | | | rs301193 |
| | | | | rs2062246 |
| | | | | rs4857681 |
| | | | | rs4857686 |
| | | | | rs11710431 |
| | | | | rs4857698 |
| | | | | rs13091297 |
| | | | | rs9798968 |
| | | | | rs11922088 |
| rs301193 | INTERGENIC | N/A | −9 | rs177295 |
| | | | | rs301191 |
| | | | | rs2062246 |
| | | | | rs4857681 |
| | | | | rs4857686 |
| | | | | rs11710431 |
| | | | | rs4857698 |
| | | | | rs13091297 |
| | | | | rs9798968 |
| | | | | rs11922088 |
| rs12583395 | INTERGENIC | NBEA | −296678 | |
| rs4388301 | INTERGENIC | TNFAIP3 | 77933 | |
| rs4939517 | INTRONIC | CYBASC3 | 0 | rs7111608 |
| | | | | rs11230659 |
| | | | | rs6591651 |
| | | | | rs1037448 |
| | | | | rs10750955 |
| | | | | rs3741265 |
| | | | | rs10897158 |
| | | | | rs921635 |
| | | | | rs3018727 |
| | | | | rs3019198 |
| | | | | rs2860519 |
| | | | | rs3809083 |
| | | | | rs2943807 |
| | | | | rs2943806 |
| | | | | rs896831 |
| | | | | rs879647 |
| | | | | rs3017602 |
| | | | | rs2943805 |
| | | | | rs17702 |
| | | | | rs1377456 |
| | | | | rs720888 |
| | | | | rs720891 |
| | | | | rs6591654 |
| | | | | rs6591655 |
| | | | | rs729404 |
| | | | | rs729347 |
| | | | | rs3018729 |
| | | | | rs2924436 |
| | | | | rs11230701 |
| | | | | rs3019186 |
| | | | | rs896829 |
| | | | | rs748902 |
| | | | | rs730338 |
| | | | | rs2943800 |
| | | | | rs2957860 |
| | | | | rs2924441 |
| | | | | rs2924446 |
| | | | | rs3017605 |
| | | | | rs2100388 |
| rs1037448 | INTRONIC | TMEM138 | 0 | rs7111608 |
| | | | | rs11230659 |
| | | | | rs6591651 |
| | | | | rs4939517 |
| | | | | rs10750955 |
| | | | | rs3741265 |
| | | | | rs10897158 |
| | | | | rs921635 |
| | | | | rs3018727 |
| | | | | rs3019198 |
| | | | | rs2860519 |
| | | | | rs3809083 |
| | | | | rs2943807 |
| | | | | rs2943806 |
| | | | | rs896831 |
| | | | | rs879647 |
| | | | | rs3017602 |
| | | | | rs2943805 |
| | | | | rs17702 |
| | | | | rs1377456 |
| | | | | rs720888 |
| | | | | rs720891 |
| | | | | rs6591654 |
| | | | | rs6591655 |
| | | | | rs729404 |
| | | | | rs729347 |
| | | | | rs3018729 |
| | | | | rs2924436 |
| | | | | rs11230701 |
| | | | | rs3019186 |
| | | | | rs896829 |
| | | | | rs748902 |
| | | | | rs730338 |
| | | | | rs2943800 |
| | | | | rs2957860 |
| | | | | rs2924441 |
| | | | | rs2924446 |
| | | | | rs3017605 |
| | | | | rs2100388 |
| rs2348427 | INTRONIC | ENPEP | 0 | rs1126483 |
| | | | | rs12503640 |
| | | | | rs2881913 |
| | | | | rs2348429 |
| | | | | rs17551888 |
| | | | | rs6842486 |
| | | | | rs10015807 |
| | | | | rs12506732 |
| | | | | rs2348431 |
| | | | | rs6813802 |
| | | | | rs3796889 |
| | | | | rs3796888 |
| | | | | rs2348433 |
| | | | | rs1448808 |
| rs1891877 | INTRONIC | PIP4K2A | 0 | |
| rs8095186 | INTERGENIC | PIK3C3 | 251736 | rs346457 |
| rs9480684 | INTRONIC | AIM1 | 0 | rs1770728 |
| | | | | rs1770731 |
| | | | | rs1770732 |
| | | | | rs1676016 |
| | | | | rs2297971 |
| | | | | rs2066202 |
| | | | | rs2054366 |
| | | | | rs2615206 |
| | | | | rs2615207 |
| | | | | rs2642469 |
| | | | | rs1037955 |
| | | | | rs965347 |
| | | | | rs4946764 |
| | | | | rs9486398 |
| | | | | rs9486399 |
| | | | | rs9480685 |
| | | | | rs9486403 |
| | | | | rs9480686 |
| | | | | rs9486404 |
| | | | | rs3747790 |
| | | | | rs13319 |
| | | | | rs9320182 |
| | | | | rs9320183 |
| | | | | rs9486410 |
| | | | | rs9486411 |
| | | | | rs9486414 |
| | | | | rs9486415 |
| | | | | rs6926307 |
| | | | | rs6926670 |
| | | | | rs6926833 |
| | | | | rs6907164 |
| | | | | rs17067368 |
| | | | | rs9480689 |
| | | | | rs4523123 |
| | | | | rs7741101 |
| | | | | rs7776287 |
| | | | | rs7776294 |
| | | | | rs12523774 |
| | | | | rs6903754 |
| | | | | rs4945759 |
| | | | | rs9689006 |
| | | | | rs7770930 |

| | Tagged_SNP | |
|---|---|---|
| SNP | type | Tagged_SNP_r2 |
| rs1630535 | INTERGENIC | 1 |
| | INTERGENIC | 1 |
| | INTERGENIC | 1 |
| | INTERGENIC | 1 |
| | INTERGENIC | 1 |
| | INTERGENIC | 1 |
| | INTERGENIC | 1 |
| | INTERGENIC | 1 |
| | INTERGENIC | 1 |
| | INTERGENIC | 1 |
| | INTERGENIC | 1 |
| | INTERGENIC | 1 |
| | INTERGENIC | 1 |
| | INTERGENIC | 1 |
| | INTERGENIC | 1 |
| | INTERGENIC | 1 |
| | INTERGENIC | 1 |
| | INTERGENIC | 1 |
| | INTERGENIC | 1 |
| | INTERGENIC | 1 |
| | INTERGENIC | 0.87 |
| rs4724701 | INTRONIC | 0.87 |
| | INTRONIC | 0.87 |
| | INTRONIC | 0.9 |
| | INTRONIC | 1 |
| | INTRONIC | 0.96 |
| | INTRONIC | 0.96 |
| | INTRONIC | 0.96 |
| | INTRONIC | 1 |
| rs1265235 | INTERGENIC | 1 |
| | INTERGENIC | 1 |
| | INTERGENIC | 0.84 |
| rs2414660 | INTERGENIC | 1 |
| | INTERGENIC | 0.82 |
| | INTERGENIC | 0.92 |
| | INTERGENIC | 0.91 |
| | INTERGENIC | 0.85 |
| | INTERGENIC | 0.9 |
| | INTERGENIC | 0.88 |
| | INTERGENIC | 0.92 |
| | INTERGENIC | 0.84 |
| rs12589623 | INTERGENIC | 0.85 |
| | INTERGENIC | 0.85 |
| | INTERGENIC | 1 |
| | INTERGENIC | 0.95 |
| rs279553 | 5PRIME_UTR | 0.89 |
| | 3PRIME_UTR | 1 |
| | INTRONIC | 1 |
| rs279542 | 5PRIME_UTR | 0.89 |
| | SYNONYMOUS_CODING | 1 |
| | INTRONIC | 1 |
| rs583338 | INTERGENIC | 0.9 |
| | INTERGENIC | 1 |
| | INTERGENIC | 1 |
| | INTERGENIC | 1 |
| | INTERGENIC | 1 |
| | INTERGENIC | 1 |
| | INTERGENIC | 1 |
| rs2774089 | INTERGENIC | 0.97 |
| | INTERGENIC | 0.97 |
| | INTERGENIC | 0.97 |
| | INTERGENIC | 0.97 |
| rs1421780 | | |
| rs4907674 | | |
| rs7676106 | INTERGENIC | 1 |
| | INTERGENIC | 1 |
| | INTERGENIC | 1 |
| | INTERGENIC | 1 |
| | INTERGENIC | 1 |
| | INTERGENIC | 1 |
| | INTERGENIC | 1 |
| | INTERGENIC | 1 |
| | INTERGENIC | 1 |
| | INTERGENIC | 0.83 |
| | INTERGENIC | 0.83 |
| rs9949324 | INTERGENIC | 1 |
| | INTERGENIC | 1 |
| | INTERGENIC | 0.92 |
| | INTERGENIC | 1 |
| | INTERGENIC | 1 |
| rs7704939 | | |
| rs4518023 | INTERGENIC | 1 |
| | INTERGENIC | 1 |
| rs4544214 | INTRONIC | 0.81 |
| | INTRONIC | 1 |
| | UPSTREAM | 1 |
| rs6072343 | INTERGENIC | 0.92 |
| | INTERGENIC | 0.92 |
| | INTRONIC | 0.81 |
| rs965118 | DOWNSTREAM | 0.97 |
| | INTRONIC | 0.97 |
| | INTRONIC | 0.97 |
| | INTRONIC | 0.96 |
| | INTRONIC | 0.87 |
| | INTRONIC | 0.97 |
| | INTRONIC | 0.97 |
| | INTRONIC | 0.97 |
| | INTRONIC | 0.97 |
| | INTRONIC | 0.97 |
| | INTRONIC | 1 |
| | INTRONIC | 0.97 |
| | INTRONIC | 0.97 |
| | INTRONIC | 0.97 |
| | INTRONIC | 0.97 |
| | INTRONIC | 0.96 |
| | INTRONIC | 0.97 |
| | INTRONIC | 0.97 |
| | INTRONIC | 0.97 |
| | INTRONIC | 0.97 |
| | INTRONIC | 0.97 |
| | INTRONIC | 0.87 |
| | UPSTREAM | 0.81 |
| rs1109089 | DOWNSTREAM | 1 |
| | INTRONIC | 1 |
| | INTRONIC | 1 |
| | INTRONIC | 0.83 |
| | INTRONIC | 0.9 |
| | INTRONIC | 1 |
| | INTRONIC | 1 |
| | INTRONIC | 1 |
| | INTRONIC | 0.83 |
| | INTRONIC | 0.96 |
| | INTRONIC | 0.83 |
| | INTRONIC | 1 |
| | INTRONIC | 1 |
| | INTRONIC | 1 |
| | INTRONIC | 1 |
| | INTRONIC | 1 |
| | INTRONIC | 1 |
| | INTRONIC | 1 |
| | INTRONIC | 1 |
| | INTRONIC | 1 |
| | INTRONIC | 1 |
| | INTRONIC | 1 |
| | INTRONIC | 1 |
| | INTRONIC | 1 |
| | INTRONIC | 0.89 |
| | UPSTREAM | 0.86 |
| rs2980872 | INTERGENIC | 0.93 |
| rs12142266 | | |
| rs9877859 | INTRONIC | 0.84 |
| rs2025949 | INTRONIC | 0.91 |
| | INTRONIC | 0.94 |
| | INTRONIC | 0.9 |
| | INTRONIC | 0.9 |
| | INTRONIC | 0.94 |
| | INTRONIC | 0.95 |
| | INTRONIC | 1 |
| | INTRONIC | 1 |
| | INTRONIC | 0.95 |
| | INTRONIC | 0.95 |
| rs2070439 | | |
| rs12617566 | | |
| rs9589698 | INTRONIC | 1 |
| | INTRONIC | 1 |
| | INTRONIC | 1 |
| | INTRONIC | 1 |
| | INTRONIC | 1 |
| | INTRONIC | 0.91 |
| | INTRONIC | 0.9 |
| | INTRONIC | 0.91 |
| | INTRONIC | 0.95 |
| | INTRONIC | 0.89 |
| rs1958421 | INTERGENIC | 0.92 |
| | INTERGENIC | 0.92 |
| | INTERGENIC | 0.89 |
| | INTERGENIC | 0.91 |
| | INTERGENIC | 0.92 |
| | INTERGENIC | 0.92 |
| | INTERGENIC | 0.91 |
| | INTERGENIC | 0.95 |
| | INTERGENIC | 0.8 |
| | INTERGENIC | 0.92 |
| | INTERGENIC | 0.91 |
| | INTERGENIC | 0.92 |
| | INTERGENIC | 0.87 |
| | INTERGENIC | 0.91 |
| | INTERGENIC | 0.91 |
| | INTERGENIC | 0.92 |
| | INTERGENIC | 0.92 |
| | INTERGENIC | 0.92 |
| | INTERGENIC | 0.92 |
| | INTERGENIC | 0.92 |
| | INTERGENIC | 1 |
| | INTERGENIC | 0.92 |
| | INTERGENIC | 1 |
| | INTERGENIC | 1 |
| | INTERGENIC | 1 |
| | INTERGENIC | 1 |
| | INTERGENIC | 1 |
| | INTERGENIC | 1 |
| | INTERGENIC | 1 |
| | INTERGENIC | 1 |
| | INTERGENIC | 1 |
| | INTERGENIC | 1 |
| | INTERGENIC | 1 |
| | INTERGENIC | 1 |
| | INTERGENIC | 1 |
| | INTERGENIC | 1 |
| | INTERGENIC | 1 |
| | INTERGENIC | 1 |
| | INTERGENIC | 1 |
| | INTERGENIC | 1 |
| | INTERGENIC | 0.92 |
| | INTERGENIC | 1 |
| | INTERGENIC | 1 |
| | INTERGENIC | 0.91 |
| | INTERGENIC | 1 |
| | INTERGENIC | 1 |
| | INTERGENIC | 1 |
| | INTERGENIC | 0.92 |
| | INTERGENIC | 0.9 |
| | INTERGENIC | 0.92 |
| | INTERGENIC | 0.92 |
| | INTERGENIC | 0.92 |
| | INTERGENIC | 0.92 |
| | INTERGENIC | 0.92 |
| | INTERGENIC | 0.92 |
| | INTERGENIC | 0.92 |
| | INTERGENIC | 0.91 |
| | INTERGENIC | 0.92 |
| | INTERGENIC | 0.87 |
| | INTERGENIC | 0.91 |
| | INTERGENIC | 0.92 |
| | INTERGENIC | 0.92 |
| | INTERGENIC | 0.87 |
| | INTERGENIC | 0.92 |
| | INTERGENIC | 0.92 |
| | INTERGENIC | 0.82 |
| | INTERGENIC | 0.87 |
| | INTERGENIC | 0.87 |
| rs7645289 | INTERGENIC | 1 |
| | INTERGENIC | 1 |
| | INTERGENIC | 0.93 |
| | INTERGENIC | 0.94 |
| | INTERGENIC | 0.94 |
| | INTERGENIC | 0.84 |
| | INTERGENIC | 0.84 |
| rs2088138 | | |
| rs2228246 | | |
| rs2664537 | NON_SYNONYMOUS_CODING | 0.82 |
| | DOWNSTREAM | 0.93 |
| | 3PRIME_UTR | 0.82 |
| | INTRONIC | 0.82 |
| | INTRONIC | 0.82 |
| | INTRONIC | 0.82 |
| | INTRONIC | 0.94 |
| | INTRONIC | 0.94 |
| | INTRONIC | 0.82 |
| | INTRONIC | 0.82 |
| rs6500497 | 3PRIME_UTR | 0.87 |
| | 3PRIME_UTR | 0.87 |
| | UPSTREAM | 0.87 |
| | 3PRIME_UTR | 1 |
| rs2839178 | | |
| rs11258903 | INTRONIC | 1 |
| | INTRONIC | 1 |
| rs2244057 | INTERGENIC | 0.94 |
| | INTERGENIC | 0.95 |
| | INTERGENIC | 1 |
| | INTERGENIC | 0.84 |
| rs1459841 | | |
| rs7901463 | INTERGENIC | 1 |
| | INTERGENIC | 0.87 |
| | INTERGENIC | 0.87 |
| | INTERGENIC | 0.93 |
| | INTERGENIC | 0.87 |
| | INTERGENIC | 1 |
| | INTERGENIC | 0.87 |
| | INTERGENIC | 1 |
| | INTERGENIC | 1 |
| | INTERGENIC | 0.89 |
| | INTERGENIC | 1 |
| | INTERGENIC | 1 |
| | INTERGENIC | 1 |
| | INTERGENIC | 1 |
| | INTERGENIC | 1 |
| | INTERGENIC | 1 |
| | INTERGENIC | 1 |
| | INTERGENIC | 1 |
| | INTERGENIC | 0.87 |
| | INTERGENIC | 1 |
| | INTERGENIC | 0.81 |
| | INTERGENIC | 1 |
| | INTERGENIC | 1 |
| | INTERGENIC | 1 |
| | INTERGENIC | 1 |
| | INTERGENIC | 1 |
| | INTERGENIC | 1 |
| | INTERGENIC | 0.87 |
| | INTERGENIC | 0.92 |
| | INTERGENIC | 0.85 |
| | INTERGENIC | 0.9 |
| | INTERGENIC | 1 |
| | INTERGENIC | 1 |
| | INTERGENIC | 1 |
| | INTERGENIC | 1 |
| | INTERGENIC | 0.87 |
| | INTERGENIC | 0.86 |
| | INTERGENIC | 1 |
| rs584762 | INTERGENIC | 1 |
| | INTERGENIC | 1 |
| | INTERGENIC | 1 |
| | INTERGENIC | 1 |
| | INTERGENIC | 1 |
| | INTERGENIC | 1 |
| | INTERGENIC | 0.95 |
| | INTERGENIC | 0.95 |
| | INTERGENIC | 0.9 |
| | INTERGENIC | 0.9 |
| rs761453 | INTERGENIC | 1 |
| | INTERGENIC | 1 |
| | INTERGENIC | 1 |
| | INTERGENIC | 1 |
| | INTERGENIC | 1 |
| | INTERGENIC | 1 |
| | INTERGENIC | 0.95 |
| | INTERGENIC | 0.95 |
| | INTERGENIC | 0.9 |
| | INTERGENIC | 0.9 |
| rs6035712 | INTERGENIC | 0.91 |
| | INTERGENIC | 0.96 |
| rs6868846 | | |
| | INTERGENIC | 1 |
| | INTERGENIC | 1 |
| | INTERGENIC | 0.96 |
| | INTERGENIC | 0.96 |
| rs554710 | | |
| rs1013120 | INTERGENIC | 0.95 |
| | INTERGENIC | 1 |
| | INTERGENIC | 0.9 |
| rs649867 | | |
| rs6072317 | INTRONIC | 0.82 |
| | INTRONIC | 0.82 |
| | INTRONIC | 0.82 |
| | INTRONIC | 0.82 |
| | INTRONIC | 1 |
| | NON_SYNONYMOUS_CODING | 1 |
| | DOWNSTREAM | 1 |
| | 3PRIME_UTR | 0.94 |
| | 3PRIME_UTR | 1 |
| | 3PRIME_UTR | 0.82 |
| | INTRONIC | 1 |
| | INTRONIC | 1 |
| | INTRONIC | 1 |
| | INTRONIC | 1 |
| | INTRONIC | 1 |
| | INTRONIC | 1 |
| | INTRONIC | 0.88 |
| | UPSTREAM | 0.94 |
| | UPSTREAM | 0.94 |
| rs4795069 | | |
| rs13403584 | INTERGENIC | 0.86 |
| | INTERGENIC | 0.9 |
| | INTERGENIC | 0.81 |
| | INTERGENIC | 0.9 |
| | INTERGENIC | 0.9 |
| | INTERGENIC | 0.96 |
| | INTERGENIC | 0.96 |
| | INTERGENIC | 0.96 |
| | INTERGENIC | 0.96 |
| rs6948196 | DOWNSTREAM | 1 |
| | INTRONIC | 1 |
| | INTRONIC | 1 |
| | INTRONIC | 1 |
| | INTRONIC | 0.82 |
| | INTRONIC | 0.9 |
| | INTRONIC | 1 |
| | INTRONIC | 1 |
| | INTRONIC | 1 |
| | INTRONIC | 0.82 |
| | INTRONIC | 0.97 |
| | INTRONIC | 0.82 |
| | INTRONIC | 1 |
| | INTRONIC | 1 |
| | INTRONIC | 1 |
| | INTRONIC | 1 |
| | INTRONIC | 1 |
| | INTRONIC | 1 |
| | INTRONIC | 1 |
| | INTRONIC | 1 |
| | INTRONIC | 1 |
| | INTRONIC | 1 |
| | INTRONIC | 1 |
| | INTRONIC | 1 |
| | INTRONIC | 0.9 |
| | UPSTREAM | 0.84 |
| rs2662090 | INTRONIC | 0.97 |
| rs7685314 | INTERGENIC | 0.83 |
| | INTERGENIC | 1 |
| | INTERGENIC | 0.83 |
| rs2074997 | DOWNSTREAM | 1 |
| | INTRONIC | 1 |
| | INTRONIC | 1 |
| | INTRONIC | 1 |
| | INTRONIC | 0.81 |
| | INTRONIC | 0.9 |
| | INTRONIC | 1 |
| | INTRONIC | 1 |
| | INTRONIC | 0.81 |
| | INTRONIC | 0.97 |
| | INTRONIC | 0.81 |
| | INTRONIC | 1 |
| | INTRONIC | 1 |
| | INTRONIC | 1 |
| | INTRONIC | 1 |
| | INTRONIC | 1 |
| | INTRONIC | 1 |
| | INTRONIC | 1 |
| | INTRONIC | 1 |
| | INTRONIC | 1 |
| | INTRONIC | 1 |
| | INTRONIC | 1 |
| | INTRONIC | 1 |
| | INTRONIC | 1 |
| | INTRONIC | 0.9 |
| | UPSTREAM | 0.84 |
| rs6500498 | 3PRIME_UTR | 0.87 |
| | 3PRIME_UTR | 0.87 |
| | UPSTREAM | 0.87 |
| | 3PRIME_UTR | 1 |
| rs1204798 | INTRONIC | 1 |
| | INTRONIC | 1 |
| | INTRONIC | 1 |
| | INTRONIC | 1 |
| | INTRONIC | 0.83 |
| | INTRONIC | 1 |
| | INTRONIC | 1 |
| | INTRONIC | 1 |
| | INTRONIC | 1 |
| | INTRONIC | 0.88 |
| | INTRONIC | 0.83 |
| | INTRONIC | 0.94 |
| | INTRONIC | 1 |
| | INTRONIC | 0.88 |
| | INTRONIC | 0.83 |
| | INTRONIC | 0.88 |
| | INTRONIC | 0.83 |
| | INTRONIC | 1 |
| | INTRONIC | 1 |
| | INTRONIC | 0.82 |
| | INTRONIC | 1 |
| | INTRONIC | 1 |
| | INTRONIC | 1 |
| | INTRONIC | 1 |
| | INTRONIC | 0.83 |
| | INTRONIC | 0.82 |
| rs12143647 | INTRONIC | 0.81 |
| | INTRONIC | 0.81 |
| | INTRONIC | 0.82 |
| | INTRONIC | 0.86 |
| | INTRONIC | 0.82 |
| | INTRONIC | 0.82 |
| | INTRONIC | 0.84 |
| | INTRONIC | 0.84 |
| rs3801033 | INTRONIC | 0.85 |
| | INTRONIC | 0.8 |
| rs10997044 | INTRONIC | 0.84 |
| | INTRONIC | 0.95 |
| | INTRONIC | 0.95 |
| | INTRONIC | 0.95 |
| | INTRONIC | 0.95 |
| | INTRONIC | 0.95 |
| | INTRONIC | 0.95 |
| | INTRONIC | 0.95 |
| | INTRONIC | 0.95 |
| | INTRONIC | 0.95 |
| | INTRONIC | 0.95 |
| | INTRONIC | 0.91 |
| | INTRONIC | 0.91 |
| | INTRONIC | 0.95 |
| | INTRONIC | 0.95 |
| | INTRONIC | 0.95 |
| | INTRONIC | 0.95 |
| | INTRONIC | 0.95 |
| | INTRONIC | 0.91 |
| | INTRONIC | 0.95 |
| | INTRONIC | 0.81 |
| | INTRONIC | 1 |
| | INTRONIC | 1 |
| | INTRONIC | 0.95 |
| | INTRONIC | 0.95 |
| rs7350731 | | |
| rs9323737 | INTERGENIC | 0.92 |
| | INTERGENIC | 0.92 |
| | INTERGENIC | 0.89 |
| | INTERGENIC | 0.91 |
| | INTERGENIC | 0.92 |
| | INTERGENIC | 0.92 |
| | INTERGENIC | 0.91 |
| | INTERGENIC | 0.95 |
| | INTERGENIC | 0.8 |
| | INTERGENIC | 0.92 |
| | INTERGENIC | 0.91 |
| | INTERGENIC | 0.92 |
| | INTERGENIC | 0.87 |
| | INTERGENIC | 0.91 |
| | INTERGENIC | 0.91 |
| | INTERGENIC | 0.92 |
| | INTERGENIC | 0.92 |
| | INTERGENIC | 0.92 |
| | INTERGENIC | 0.92 |
| | INTERGENIC | 0.92 |
| | INTERGENIC | 1 |
| | INTERGENIC | 0.92 |
| | INTERGENIC | 1 |
| | INTERGENIC | 1 |
| | INTERGENIC | 1 |
| | INTERGENIC | 1 |
| | INTERGENIC | 1 |
| | INTERGENIC | 1 |
| | INTERGENIC | 1 |
| | INTERGENIC | 1 |
| | INTERGENIC | 1 |
| | INTERGENIC | 1 |
| | INTERGENIC | 1 |
| | INTERGENIC | 1 |
| | INTERGENIC | 1 |
| | INTERGENIC | 1 |
| | INTERGENIC | 1 |
| | INTERGENIC | 1 |
| | INTERGENIC | 1 |
| | INTERGENIC | 1 |
| | INTERGENIC | 0.92 |
| | INTERGENIC | 1 |
| | INTERGENIC | 1 |
| | INTERGENIC | 0.91 |
| | INTERGENIC | 1 |
| | INTERGENIC | 1 |
| | INTERGENIC | 1 |
| | INTERGENIC | 0.92 |
| | INTERGENIC | 0.9 |
| | INTERGENIC | 0.92 |
| | INTERGENIC | 0.92 |
| | INTERGENIC | 0.92 |
| | INTERGENIC | 0.92 |
| | INTERGENIC | 0.92 |
| | INTERGENIC | 0.92 |
| | INTERGENIC | 0.92 |
| | INTERGENIC | 0.91 |
| | INTERGENIC | 0.92 |
| | INTERGENIC | 0.87 |
| | INTERGENIC | 0.91 |
| | INTERGENIC | 0.92 |
| | INTERGENIC | 0.92 |
| | INTERGENIC | 0.87 |
| | INTERGENIC | 0.92 |
| | INTERGENIC | 0.92 |
| | INTERGENIC | 0.82 |
| | INTERGENIC | 0.87 |
| | INTERGENIC | 0.87 |
| rs4881394 | INTERGENIC | 0.8 |
| | INTERGENIC | 0.8 |
| | INTERGENIC | 0.96 |
| | INTERGENIC | 0.96 |
| | INTERGENIC | 0.8 |
| | INTERGENIC | 0.85 |
| rs4799159 | INTERGENIC | 0.85 |
| | INTERGENIC | 0.85 |
| | INTERGENIC | 0.93 |
| | INTERGENIC | 0.93 |
| | INTERGENIC | 1 |
| rs356999 | INTERGENIC | 1 |
| | INTERGENIC | 1 |
| | INTERGENIC | 1 |
| rs2270101 | INTERGENIC | 0.96 |
| | INTERGENIC | 0.96 |
| | INTERGENIC | 0.96 |
| | INTERGENIC | 0.96 |
| | INTERGENIC | 0.96 |
| rs618670 | | |
| rs7788668 | INTERGENIC | 0.92 |
| | INTERGENIC | 0.92 |
| | INTERGENIC | 0.83 |
| | INTERGENIC | 0.96 |
| | DOWNSTREAM | 1 |
| | 3PRIME_UTR | 0.96 |
| | 3PRIME_UTR | 0.96 |
| | INTRONIC | 1 |
| | INTRONIC | 1 |
| | INTRONIC | 0.95 |
| | INTRONIC | 1 |
| | INTRONIC | 0.83 |
| | INTRONIC | 0.82 |
| | INTRONIC | 1 |
| | INTRONIC | 0.85 |
| | INTRONIC | 0.88 |
| | INTRONIC | 0.83 |
| | INTERGENIC | 0.96 |
| | INTERGENIC | 0.96 |
| | INTERGENIC | 0.96 |
| | INTERGENIC | 0.81 |
| | INTERGENIC | 0.84 |
| | INTERGENIC | 0.88 |
| rs902923 | INTERGENIC | 0.88 |
| | INTERGENIC | 0.94 |
| | INTERGENIC | 0.88 |
| | INTERGENIC | 0.89 |
| | INTERGENIC | 0.89 |
| | INTERGENIC | 1 |
| | DOWNSTREAM | 1 |
| | INTRONIC | 1 |
| rs9332172 | INTERGENIC | 1 |
| | INTERGENIC | 0.9 |
| | INTRONIC | 0.9 |
| | INTRONIC | 1 |
| | INTRONIC | 1 |
| | INTRONIC | 1 |
| | DOWNSTREAM | 1 |
| rs6873640 | INTERGENIC | 0.97 |
| rs9302822 | INTERGENIC | 0.84 |
| | INTERGENIC | 0.84 |
| | INTERGENIC | 0.84 |
| | INTERGENIC | 0.81 |
| | INTERGENIC | 0.81 |
| | INTERGENIC | 0.81 |
| rs4810622 | INTRONIC | 0.93 |
| | INTRONIC | 0.82 |
| | INTRONIC | 0.82 |
| | INTRONIC | 1 |
| | INTRONIC | 1 |
| | INTRONIC | 0.92 |
| rs3753151 | DOWNSTREAM | 0.84 |
| | INTRONIC | 0.82 |
| | INTRONIC | 0.82 |
| | INTRONIC | 0.83 |
| | INTRONIC | 1 |
| | INTRONIC | 0.84 |
| | INTRONIC | 0.81 |
| | INTRONIC | 0.82 |
| | INTRONIC | 1 |
| | INTRONIC | 0.9 |
| | INTRONIC | 0.82 |
| | INTRONIC | 0.82 |
| | INTRONIC | 0.84 |
| | INTRONIC | 0.82 |
| | INTRONIC | 0.82 |
| | INTRONIC | 0.82 |
| | INTRONIC | 0.84 |
| | INTRONIC | 0.82 |
| | INTRONIC | 0.82 |
| | INTRONIC | 0.82 |
| | INTRONIC | 0.81 |
| | INTRONIC | 0.82 |
| rs10490832 | | |
| rs1545384 | INTRONIC | 0.9 |
| | INTRONIC | 0.95 |
| rs1884641 | UPSTREAM | 1 |
| | INTERGENIC | 0.81 |
| rs1958438 | INTERGENIC | 1 |
| | INTERGENIC | 1 |
| | INTERGENIC | 1 |
| | INTERGENIC | 1 |
| | INTERGENIC | 1 |
| | INTERGENIC | 1 |
| | INTERGENIC | 1 |
| | INTERGENIC | 0.9 |
| | INTERGENIC | 1 |
| | INTERGENIC | 1 |
| | INTERGENIC | 1 |
| | INTERGENIC | 0.96 |
| | INTERGENIC | 1 |
| | INTERGENIC | 1 |
| | INTERGENIC | 1 |
| | INTERGENIC | 1 |
| | INTERGENIC | 1 |
| | INTERGENIC | 1 |
| | INTERGENIC | 1 |
| | INTERGENIC | 0.92 |
| | INTERGENIC | 1 |
| | INTERGENIC | 0.92 |
| | INTERGENIC | 0.92 |
| | INTERGENIC | 0.92 |
| | INTERGENIC | 0.92 |
| | INTERGENIC | 0.91 |
| | INTERGENIC | 0.91 |
| | INTERGENIC | 0.92 |
| | INTERGENIC | 0.92 |
| | INTERGENIC | 0.92 |
| | INTERGENIC | 0.92 |
| | INTERGENIC | 0.92 |
| | INTERGENIC | 0.92 |
| | INTERGENIC | 0.92 |
| | INTERGENIC | 0.92 |
| | INTERGENIC | 0.91 |
| | INTERGENIC | 0.95 |
| | INTERGENIC | 0.91 |
| | INTERGENIC | 0.92 |
| | INTERGENIC | 0.92 |
| | INTERGENIC | 0.84 |
| | INTERGENIC | 0.92 |
| | INTERGENIC | 0.91 |
| | INTERGENIC | 0.82 |
| | INTERGENIC | 0.92 |
| | INTERGENIC | 0.92 |
| | INTERGENIC | 0.95 |
| | INTERGENIC | 1 |
| | INTERGENIC | 1 |
| | INTERGENIC | 1 |
| | INTERGENIC | 1 |
| | INTERGENIC | 1 |
| | INTERGENIC | 1 |
| | INTERGENIC | 1 |
| | INTERGENIC | 1 |
| | INTERGENIC | 1 |
| | INTERGENIC | 1 |
| | INTERGENIC | 1 |
| | INTERGENIC | 0.95 |
| | INTERGENIC | 1 |
| | INTERGENIC | 1 |
| | INTERGENIC | 1 |
| | INTERGENIC | 0.95 |
| | INTERGENIC | 1 |
| | INTERGENIC | 1 |
| | INTERGENIC | 0.91 |
| | INTERGENIC | 0.95 |
| | INTERGENIC | 0.87 |
| | INTERGENIC | 0.87 |
| | INTERGENIC | 0.87 |
| | INTERGENIC | 0.87 |
| | INTERGENIC | 0.87 |
| | INTERGENIC | 0.87 |
| | INTERGENIC | 0.95 |
| | INTERGENIC | 0.87 |
| rs4917639 | INTERGENIC | 1 |
| | INTERGENIC | 0.91 |
| | INTRONIC | 0.91 |
| | INTRONIC | 1 |
| | INTRONIC | 1 |
| | INTRONIC | 1 |
| | DOWNSTREAM | 1 |
| rs2279103 | INTRONIC | 0.86 |
| | INTRONIC | 0.95 |
| | INTRONIC | 1 |
| | INTRONIC | 1 |
| | INTRONIC | 1 |
| | INTRONIC | 1 |
| | INTRONIC | 1 |
| | INTRONIC | 1 |
| | INTRONIC | 1 |
| | INTRONIC | 0.82 |
| | 3PRIME_UTR | 1 |
| | DOWNSTREAM | 0.82 |
| | INTERGENIC | 0.82 |
| | INTERGENIC | 0.82 |
| | INTERGENIC | 0.82 |
| | INTERGENIC | 1 |
| | INTERGENIC | 0.82 |
| | INTERGENIC | 1 |
| | INTERGENIC | 0.81 |
| | INTERGENIC | 0.95 |
| rs7307064 | INTRONIC | 1 |
| | INTRONIC | 1 |
| | INTRONIC | 1 |
| | INTRONIC | 1 |
| | INTRONIC | 0.85 |
| | INTRONIC | 0.91 |
| | 5PRIME_UTR | 0.86 |
| rs6793017 | INTRONIC | 0.88 |
| | INTRONIC | 0.95 |
| rs523386 | INTRONIC | 0.86 |
| | INTRONIC | 0.95 |
| | INTRONIC | 1 |
| | INTRONIC | 1 |
| | INTRONIC | 1 |
| | INTRONIC | 1 |
| | INTRONIC | 1 |
| | INTRONIC | 1 |
| | NON_SYNONYMOUS_CODING | 1 |
| | INTRONIC | 1 |
| | INTRONIC | 0.82 |
| | 3PRIME_UTR | 1 |
| | DOWNSTREAM | 0.82 |
| | INTERGENIC | 0.82 |
| | INTERGENIC | 0.82 |
| | INTERGENIC | 0.82 |
| | INTERGENIC | 0.82 |
| | INTERGENIC | 1 |
| | INTERGENIC | 0.81 |
| | INTERGENIC | 0.95 |
| rs7719325 | INTERGENIC | 0.95 |
| | INTERGENIC | 1 |
| rs1984151 | INTERGENIC | 1 |
| | INTERGENIC | 1 |
| | INTERGENIC | 1 |
| | INTERGENIC | 1 |
| | INTERGENIC | 1 |
| | INTERGENIC | 0.96 |
| | INTERGENIC | 0.95 |
| | INTERGENIC | 0.85 |
| | INTERGENIC | 0.83 |
| | INTERGENIC | 0.85 |
| | INTERGENIC | 0.88 |
| | INTERGENIC | 0.85 |
| | INTERGENIC | 0.82 |
| | INTERGENIC | 0.81 |
| | INTERGENIC | 0.85 |
| | INTERGENIC | 0.82 |
| | INTERGENIC | 0.82 |
| | INTERGENIC | 0.82 |
| | INTERGENIC | 0.82 |
| | INTERGENIC | 0.82 |
| rs1454333 | INTERGENIC | 0.93 |
| | INTERGENIC | 0.93 |
| rs11250017 | DOWNSTREAM | 0.83 |
| | DOWNSTREAM | 0.96 |
| rs7146332 | INTERGENIC | 0.97 |
| | INTERGENIC | 0.96 |
| | INTERGENIC | 0.97 |
| | INTERGENIC | 0.88 |
| | INTERGENIC | 1 |
| | INTERGENIC | 1 |
| | INTERGENIC | 1 |
| | INTERGENIC | 1 |
| | INTERGENIC | 1 |
| | INTERGENIC | 1 |
| | INTERGENIC | 1 |
| rs17175096 | INTERGENIC | 0.89 |
| | INTERGENIC | 0.94 |
| | INTERGENIC | 1 |
| rs720733 | INTERGENIC | 1 |
| | INTERGENIC | 1 |
| | INTERGENIC | 1 |
| | INTERGENIC | 1 |
| | INTERGENIC | 1 |
| | INTERGENIC | 1 |
| | INTERGENIC | 1 |
| rs2299965 | DOWNSTREAM | 1 |
| | INTRONIC | 1 |
| | INTRONIC | 1 |
| | INTRONIC | 1 |
| | INTRONIC | 0.82 |
| | INTRONIC | 0.9 |
| | INTRONIC | 1 |
| | INTRONIC | 1 |
| | INTRONIC | 1 |
| | INTRONIC | 0.82 |
| | INTRONIC | 0.97 |
| | INTRONIC | 0.82 |
| | INTRONIC | 1 |
| | INTRONIC | 1 |
| | INTRONIC | 1 |
| | INTRONIC | 1 |
| | INTRONIC | 1 |
| | INTRONIC | 1 |
| | INTRONIC | 1 |
| | INTRONIC | 1 |
| | INTRONIC | 1 |
| | INTRONIC | 1 |
| | INTRONIC | 1 |
| | INTRONIC | 1 |
| | INTRONIC | 0.9 |
| | UPSTREAM | 0.84 |
| rs2299967 | DOWNSTREAM | 1 |
| | INTRONIC | 1 |
| | INTRONIC | 1 |
| | INTRONIC | 1 |
| | INTRONIC | 0.84 |
| | INTRONIC | 0.9 |
| | INTRONIC | 1 |
| | INTRONIC | 1 |
| | INTRONIC | 1 |
| | INTRONIC | 0.84 |
| | INTRONIC | 0.97 |
| | INTRONIC | 0.84 |
| | INTRONIC | 1 |
| | INTRONIC | 1 |
| | INTRONIC | 1 |
| | INTRONIC | 1 |
| | INTRONIC | 1 |
| | INTRONIC | 1 |
| | INTRONIC | 1 |
| | INTRONIC | 1 |
| | INTRONIC | 1 |
| | INTRONIC | 1 |
| | INTRONIC | 1 |
| | INTRONIC | 1 |
| | INTRONIC | 0.9 |
| | UPSTREAM | 0.84 |
| rs7550277 | INTRONIC | 0.86 |
| | INTRONIC | 0.86 |
| | INTRONIC | 1 |
| | INTRONIC | 1 |
| | INTRONIC | 1 |
| | INTRONIC | 1 |
| | INTRONIC | 1 |
| | INTRONIC | 1 |
| | INTRONIC | 1 |
| | INTRONIC | 1 |
| | INTRONIC | 1 |
| | INTRONIC | 1 |
| rs635546 | | |
| rs301191 | INTERGENIC | 1 |
| | INTERGENIC | 1 |
| | INTERGENIC | 1 |
| | INTERGENIC | 1 |
| | INTERGENIC | 1 |
| | INTERGENIC | 1 |
| | INTERGENIC | 1 |
| | INTERGENIC | 1 |
| | INTERGENIC | 0.86 |
| | INTERGENIC | 1 |
| rs301193 | INTERGENIC | 1 |
| | INTERGENIC | 1 |
| | INTERGENIC | 1 |
| | INTERGENIC | 1 |
| | INTERGENIC | 1 |
| | INTERGENIC | 1 |
| | INTERGENIC | 1 |
| | INTERGENIC | 1 |
| | INTERGENIC | 0.86 |
| | INTERGENIC | 1 |
| rs12583395 | | |
| rs4388301 | | |
| rs4939517 | INTRONIC | 1 |
| | INTRONIC | 1 |
| | INTRONIC | 1 |
| | INTRONIC | 1 |
| | UPSTREAM | 1 |
| | SYNONYMOUS_CODING | 0.94 |
| | INTRONIC | 0.94 |
| | INTRONIC | 0.94 |
| | INTRONIC | 0.94 |
| | SYNONYMOUS_CODING | 0.93 |
| | INTRONIC | 0.93 |
| | INTRONIC | 0.94 |
| | INTRONIC | 0.94 |
| | INTRONIC | 0.87 |
| | INTRONIC | 0.87 |
| | INTRONIC | 0.87 |
| | INTRONIC | 0.87 |
| | INTRONIC | 0.87 |
| | 3PRIME_UTR | 0.87 |
| | DOWNSTREAM | 0.87 |
| | DOWNSTREAM | 0.84 |
| | DOWNSTREAM | 0.87 |
| | DOWNSTREAM | 0.87 |
| | INTERGENIC | 0.87 |
| | INTERGENIC | 0.87 |
| | INTERGENIC | 0.87 |
| | INTERGENIC | 0.87 |
| | INTERGENIC | 0.87 |
| | INTERGENIC | 0.87 |
| | INTERGENIC | 0.87 |
| | INTERGENIC | 0.87 |
| | INTERGENIC | 0.94 |
| | INTERGENIC | 0.85 |
| | UPSTREAM | 0.94 |
| | UPSTREAM | 0.93 |
| | UPSTREAM | 0.94 |
| | DOWNSTREAM | 0.87 |
| | DOWNSTREAM | 0.81 |
| | INTERGENIC | 0.87 |
| rs1037448 | INTRONIC | 1 |
| | INTRONIC | 1 |
| | INTRONIC | 1 |
| | INTRONIC | 1 |
| | UPSTREAM | 1 |
| | SYNONYMOUS_CODING | 0.94 |
| | INTRONIC | 0.94 |
| | INTRONIC | 0.94 |
| | INTRONIC | 0.94 |
| | SYNONYMOUS_CODING | 0.94 |
| | INTRONIC | 0.94 |
| | INTRONIC | 0.94 |
| | INTRONIC | 0.94 |
| | INTRONIC | 0.87 |
| | INTRONIC | 0.88 |
| | INTRONIC | 0.87 |
| | INTRONIC | 0.88 |
| | INTRONIC | 0.88 |
| | 3PRIME_UTR | 0.87 |
| | DOWNSTREAM | 0.88 |
| | DOWNSTREAM | 0.84 |
| | DOWNSTREAM | 0.88 |
| | DOWNSTREAM | 0.88 |
| | INTERGENIC | 0.88 |
| | INTERGENIC | 0.88 |
| | INTERGENIC | 0.87 |
| | INTERGENIC | 0.88 |
| | INTERGENIC | 0.88 |
| | INTERGENIC | 0.88 |
| | INTERGENIC | 0.88 |
| | INTERGENIC | 0.88 |
| | INTERGENIC | 0.94 |
| | INTERGENIC | 0.86 |
| | UPSTREAM | 0.94 |
| | UPSTREAM | 0.94 |
| | UPSTREAM | 0.94 |
| | DOWNSTREAM | 0.88 |
| | DOWNSTREAM | 0.82 |
| | INTERGENIC | 0.88 |
| rs2348427 | NON_SYNONYMOUS_CODING | 1 |
| | INTRONIC | 1 |
| | INTRONIC | 1 |
| | INTRONIC | 1 |
| | INTRONIC | 1 |
| | INTRONIC | 1 |
| | INTRONIC | 1 |
| | INTRONIC | 0.96 |
| | INTRONIC | 0.96 |
| | INTRONIC | 0.96 |
| | INTRONIC | 0.96 |
| | INTRONIC | 1 |
| | INTRONIC | 1 |
| | INTRONIC | 0.8 |
| rs1891877 | | |
| rs8095186 | INTERGENIC | 0.92 |
| rs9480684 | INTRONIC | 0.93 |
| | INTRONIC | 0.91 |
| | INTRONIC | 0.93 |
| | INTRONIC | 0.93 |
| | INTRONIC | 0.93 |
| | INTRONIC | 0.86 |
| | INTRONIC | 1 |
| | INTRONIC | 1 |
| | INTRONIC | 1 |
| | INTRONIC | 1 |
| | INTRONIC | 1 |
| | INTRONIC | 1 |
| | INTRONIC | 1 |
| | INTRONIC | 1 |
| | INTRONIC | 1 |
| | INTRONIC | 1 |
| | INTRONIC | 1 |
| | INTRONIC | 1 |
| | INTRONIC | 1 |
| | 3PRIME_UTR | 0.93 |
| | 3PRIME_UTR | 1 |
| | 3PRIME_UTR | 1 |
| | 3PRIME_UTR | 1 |
| | SYNONYMOUS_CODING | 1 |
| | INTRONIC | 1 |
| | INTRONIC | 1 |
| | INTRONIC | 1 |
| | INTRONIC | 1 |
| | INTRONIC | 1 |
| | INTRONIC | 1 |
| | INTRONIC | 1 |
| | INTRONIC | 1 |
| | INTRONIC | 1 |
| | INTRONIC | 1 |
| | INTRONIC | 1 |
| | INTRONIC | 1 |
| | INTRONIC | 1 |
| | INTRONIC | 0.92 |
| | INTRONIC | 1 |
| | INTRONIC | 1 |
| | INTRONIC | 1 |
| | INTRONIC | 1 |

SNP: reference sequence identification number according to dbSNP; type: location/function of SNP;
CHR: chromosome number;
MAP: physical location of SNP on genome build HG18.
tagged SNP r²: Linkage disequilibrium (LD) in the observed regions was assessed by calculating r² according to Hill et al. 1968.²⁵

[0050] It is known in the art that two or more alleles, polymorphisms or SNPs may be associated in a non-random manner. Such SNPs are also referred to as being in linkage disequilibrium and are inherited together. A genomic region comprising a group of SNPs being in linkage disequilibrium may also be referred to as haplotype block. SNPs being located within the same haplotype block may also be referred to as “tagged SNPs”. Each of the SNPs provided in Table 1 may be replaced with a corresponding tagged SNP from Table 4 for the purpose of the present invention. Corresponding tagged SNPs for a given SNP provided in column 1 of Table 4 are those tagged SNPs which are listed in column 5 of Table 4 subsequent to the given SNP. For example, SNPs rs1872133, rs1872132, until SNP rs12899914 are tagged SNPs corresponding to SNP rs1630535. Preferred tagged SNPs are those with a correlation coefficient (r2 value) of 1. The risk alleles of the tagged SNPs are those alleles which co-occur with the risk allele of the respective SNP as listed in Table 1. “Co-occurrence” in this context refers to those alleles of a group of SNPs within a haplotype block which occur together. Determining co-occurrence is within the skills of the skilled person.

[0051] The figures show:

[0052] FIG. 1 Distribution of risk alleles in cases and controls applying the subset of 18 SNPs according to the invention in the discovery sample (see Table 3).

[0053] FIG. 2 Receiver Operating Characteristics (ROC) curve of the number of risk alleles as a predictor applying the subset of 18 SNPs according to the invention in the discovery sample. The area under the curve is 1.0 hence yielding a perfect classification.

[0054] FIG. 3 Distribution of risk alleles in cases and controls applying SNPs as defined by SEQ ID NOs: 1 to 100 in the discovery sample.

[0055] FIG. 4 Receiver Operating Characteristics (ROC) curve of the number of risk alleles as a predictor applying SNPs as defined by SEQ ID NOs: 1 to 100 in the discovery sample. The area under the curve is 1.0 hence yielding a perfect classification.

[0056] The following examples illustrate the invention but should not be construed as being limiting.

### EXAMPLE 1

### Methods

[0057] Discovery Sample—Patient Recruitment

[0058] We recruited 397 patients aged 18 to 75 years who were admitted to the hospital of the Max Planck Institute of Psychiatry (MPI), Munich, Germany, for treatment of a depressive disorder presenting with a unipolar depressive episode (85.7%), bipolar disorder (12.4%, 6.1% bipolar 1 and 6.3% bipolar II), or other primary diagnosis with current depression (0.5% dysthymia, 0.7% adjustment disorder). Patients were diagnosed by psychiatrists according to the Diagnostic and Statistical Manual of Mental Disorders (DSM) IV criteria and were included in the study within the first three days after in-patient admission. Patients with depressive disorder due to a general medical or neurological condition were excluded, as were patients with a lifetime diagnosis of intravenous drug abuse and depressive symptoms secondary to alcohol or substance abuse or dependency. We recorded ethnicity using a self-report sheet for nationality, first language and ethnicity of the patient and of all four grandparents. All individuals included were Caucasian, 85.1% were of German origin. The study was approved by the local ethics committee, and written informed consent was obtained from all subjects.

[0059] The study is designed as a naturalistic pharmacogenetic study (Munich Antidepressant Response Signature (MARS) project) to reveal genetic biomarkers specific for depressive disorder, clinical outcome and severe side effects. All patients are treated with antidepressants according to doctor's choice. Concomitant psychotropic medication with mood stabilizers, neuroleptics, benzodiazepines and hypnotics is allowed. For all patients plasma concentrations of antidepressants were monitored to assure clinical effective drug levels.

### Replication Sample

[0060] The German replication sample consisted of 501 Caucasian inpatients from the psychiatric hospital of the University of Munster and from a second patient recruitment in the Max Planck Institute of Psychiatry (MPI), Munich. Gender distribution (p>0.2) and age (p>0.9) did not differ between samples. Overall, 85% of these patients suffered from major depression, while 15% were in a depressive episode of a bipolar disorder. TESI positive were N=42/8.4%, patients completely lacking suicidal ideation N=149/29.7% and N=434/86.6% without increase in suicidal ideation. Psychiatrists ascertained DSM IV diagnosis. Patients were rated weekly from admission to discharge (Munich) or until week 6 (Munster) using the 21-item HAM-D rating scale. Ethnicity was recorded using the same self-report questionnaire as in the MARS study. All patients were Caucasian and 90.7% were of German origin; the remaining patients were of European descent (Central Europe: 3.9%; Eastern Europe: 5.3%; Mediterranean: 0.1%). Same inclusion/exclusion criteria applied as in the MARS sample, and outcome under antidepressant treatment was evaluated accordingly.

[0061] Psychopathology and Phenotype Definition

[0062] Severity of depressive symptoms was assessed at admission by trained raters using the 21-item Hamilton Depression Rating Scale (HAM-D)^{26.27}. Patients fulfilling the criteria for at least a moderate to severe depressive episode (HAM-D>=14) were eligible. Ratings were performed within five days of admission and then weekly until discharge. The severity of suicidal ideation was rated by item 3 “suicide” of the HAM-D, with 0 “absent”; 1 “subject feels life is not worth living”; 2 “wishes he/she were dead or any thoughts of possible death to self”; 3 “suicidal ideas or gestures” and 4 “attempts at suicide”. TESI was defined as an increase of suicidal thoughts in patients without suicidal ideation (item 3 of the HAM-D=zero) at hospital admission (n=32). The non-TESI comparison groups were 1) all individuals without increase in suicidality independent of baseline suicidality (no increase of the HAM-D item 3 over time; n=329) and 2) a sub-group of 1), patients rating zero on item 3 throughout treatment (item 3 of the HAM-D=zero at all visits; n=79). In the STAR*D trial the suicide item (item number 12) of the Quick Inventory of Depression Symptomatology-Self Report (QIDS-SR) was used to define TESI. Both scales should identify similar patients as the QIDS-SR has been shown to correlate well with the HAM-D²⁸⁻³¹. The observation period for TESI was the first 12 weeks following in-patient admission, congruent with the observation period used in Laje et al., 2007

[0063] DNA Preparation

[0064] After enrolment in the study 40 ml of EDTA blood were drawn from each patient. DNA was extracted from fresh blood using the Puregene® whole blood DNA-extraction kit (Gentra Systems Inc; MN).

[0065] Statistical Analysis of Genetic Associations

[0066] Exact tests on Hardy-Weinberg equilibrium (HWE) were performed for all SNPs SNPs with a minor allele frequency below 2.5%, with a call rate of less than 98%, or displaying HWE deviation at an error level of below 10⁻⁵ were excluded from the analysis. Final analysis was done in 371.335 SNPs. Both allelic and genotypic association tests were applied. To avoid false positive associations due to small cell sizes we used permutation-based p-value estimates (100,000 permutations, in 4 best SNPs 100,000,000 permutations) in addition to asymptotic p-values. If not otherwise specified, permutation-based p-values are reported. Genetic association was tested using the WG-permer, a C++ based statistical program for rapid permutation (http://www.wg-permer.org) Phenotypic analyses were performed using SPSS version 16.0.

### Results

[0067] The comparisons of disease-related and sociodemographic variables between TESI positive and negative patients using both the broader (comparison group 1) and more restricted definition (comparison group 2) are listed in Table 5. Except for age at onset there were no significant differences among these groups. 59.3% of patients with TESI developed this side effect within the first 2 weeks after hospital admission. Current medication at the onset of suicidal ideation were SSRIs in 37.5%, tricyclic antidepressants in 34.3%, venlafaxine or duloxetine as dual serotonin and noradrenalin reuptake inhibitors in 25%, mirtazapine in 28% and reboxetine as a selective noradrenalin reuptake inhibitor in 12.5%. Antidepressant monotherapy was administered to 62.5% of the patients, while 37.5% received combination therapy. There were no significant differences in psychotropic medication among the three groups (Table 6).

TABLE 5
Table 5: Sociodemographic and clinical features of patients in the
discovery sample developing TESI compared with patients without
worsening of suicidal thoughts under psychopharmacological treatment
(1) and with patients completely lacking suicidal ideation (2).

| | TESI | Non-TESI (1) | Non-TESI (2) | |
|---|---|---|---|---|
| | n = 32 | n = 329 | n = 79 | χ² or |
| Characteristics of discovery sample | 8.1% | 82.6% | 19.9% | t-test |
| Male | 43.8% | 44.8% | 49.5% | NS |
| Female | 56.3% | 55.2% | 50.5% | NS |
| Age (mean +/− SD) | 47.1 (16.1) | 49.3 (14.1) | 50.8 (14.3) | NS |
| Employment status | | | | |
| employed | 62.9% | 63.4% | 61.1% | NS |
| retired | 25.7% | 24.1% | 23.4% | NS |
| unemployed | 11.4% | 12.5% | 15.5% | NS |
| Living with partner/children/ | 54.3% | 60.9% | 64.5% | NS |
| personnel | | | | |
| Single | 45.7% | 39.1% | 35.5% | NS |
| Age at onset (mean. +/− SD) | 32.6 (16.0) | 37.3 (15.4) | 40.6 (15.6) | * |
| HAM-D at inclusion (mean. +/− SD) | 24.5 (7.1) | 26.6 (6.6) | 22.8 (6.5) | NS |
| Previous episodes (mean. +/− SD) | 3.2 (4.0) | 2.8 (5.3) | 2.7 (5.5) | NS |
| Recurrent depression | 56.3% | 58.2% | 60.4% | NS |
| Psychotic features | 18.8% | 11.9% | 13.9% | NS |
| Illness duration in years | 13.9 (15.4) | 10.6 (10.5) | 10.3 (10.1) | NS |
| (mean. +/− SD) | | | | |
| Duration of current episode in weeks | 38.0 (58.4) | 39.1 (69.3) | 28.4 (21.7) | NS |
| (mean. +/− SD) | | | | |
| Family history of depression | 46.9% | 46.6% | 40.5% | NS |
| History of attempted suicide | 18.8% | 28.7% | 16.2% | NS |

* p = 0.012 TESI vs. Non-TESI (2).
NS = not significant.

TABLE 6
Table 6: Psychotropic medication at onset of TESI compared
with medication of control group in the discovery sample

| | TESI | Non-TESI (1) | Non-TESI (2) | |
|---|---|---|---|---|
| Medication | n = 32 | n = 79 | n = 329 | t-test |
| SSRI | 37.5% | 37.8% | 35.7% | NS |
| Tricyclic | 34.4% | 20.4% | 22.9% | NS |
| antidepressants | | | | |
| SNRI | 25% | 19.4% | 19.2% | NS |
| Mirtazapine | 28% | 35.7% | 34% | NS |
| NRI | 12.5% | 2% | 4% | NS |
| Neuroleptics | 21.9% | 17.3% | 22% | NS |
| Mood stabilizers | 46.9% | 35.7% | 29.9% | NS |
| Benzodiazepines | 50% | 20.4% | 30% | *# |

Medication was according to doctor's choice. A combination of two or more antidepressants was also allowed (TESI = 37.5%; Non-TESI (1) = 23.5%; Non-TESI (2) = 24.4%; no significant difference).
*TESI vs Non-TESI (1) p < 0.05;
#TESI vs Non-TESI (2) p < 0.05.
NS = not significant

[0068] Provided are 100 SNPs, which were significantly associated with TESI with an empiric p-value <0.001 comparing to both non-TESI groups (see Table 1). SNP rs1630535 showed a p value of 1.3×10⁻⁷, OR 10.535, CI 4.2-26.4 comparing to narrow non-TESI group, and p value of 2.45×10⁻⁷, OR 4.16, CI 2.3-7.4 comparing to broader non-TESI group. Fisher Product Method over all 100 SNPs revealed a significant association comparing TESI vs non-TESI(2) with allelic p=1×10⁻⁵, genotypic p=1×10⁻⁵ and combination of allelic and genotypic p=1×10⁻⁵. A discriminant analysis patients using this subset of SNPs revealed a 100% probability to classify TESI vs non-TESI cases correctly, no matter if narrow or broader non-TESI definition was applied (narrow definition, 32 vs 79: chi square=273 and df=91; broader definition, 32 vs 329: Chi square=429 and df=96). Furthermore, the distribution of the number of risk alleles present in each individual yielded two separate groups, with TESI cases having 85 and more risk alleles while non-TESI individuals having 80 and less risk allies (see FIG. 3).

[0069] 100 SNPs with p<0.001 from the discovery sample were tested in a second independent German Caucasian sample (referred to as “replication sample”), revealing 16 SNPs particularly significantly associated with TESI in both discovery and replication sample.

TABLE 7
Sequences of the SNPs of SEQ ID NOs: 1 to 100; in no particular order. The polymorphic
position is indicated by square brackets, for example [A/G] in case of rs6793017

| SNP | |
|---|---|
| rs# | Sequence |
| rs6793017 | ATAATTGTTTGAGTCACAGAGGTTCCTACNACTCCATTAAGACAGAAGGTATAGCCTAGAGTTGGTGGGTCTGAGACAGTGTCTC |
| | CAAAGTCTGAAGGATAATAACTGAATATAGACTCCAAAATTTAAGGCTTCAGCATCCTCAGAGTCCTTGCATTTGTGAGAGCTAT |
| | GTCTGTGATGTTGCCGTTTGCACCAGGAT[A/G]CTTTATGTTGTCTTTTAAGTGTTAGGTGTCCAGATGCAGATCACCTGCATCT |
| | TGCCTCATATGTCTCTCTGAATGTAAAGATTTTGCCTACATCTGATGAAAACTGTCCACTGTTCACATTATTTGTCATATGTATC |
| | TGCTTGGAGCAGAGTAAGACACTTCTAAGGGAACTTGACATTTCATGACCCAGGATATCAGAT |
| rs1265235 | ACTGCATCTGCGTAGACNTGTCATCCAGTATACTCATGCGATGTCACTCATCTGCCCCCTCCTACATAAATGATACACAAAAAAG |
| | TCAACAATCAGAGAAACCCAAGCTCCTGGATGTCAACATCCACTTCTGCTTGGAGTTGGTTCCTTTCATGGAGACATACACCCCT |
| | CGCCACACACCTGCCACCTCCCTGACCCTC[A/G]CAATCCCTGGCATGAGAAGCTCCACCTTGTCAAGAGCAGACATTCTGAAAG |
| | GCTGAAGCCAGGAACCTTAAAGGAAACATTCTGCCAAGTCCACCACGTAGGATCAATGGAGATGGTGGTAGTGTGGTTATTGGCT |
| | TACCCAGCTCTGGGTGTAGAGTGCTTTGGGGAGGAGGAAGGAAGAAGAGCTGATCCTGCCTTCT |
| rs4881394 | ATCAGTGGCAGAGACTCTCCCTGCTCTCATGGGCTCTGTCTATTCCCTCTCTACATAATNAGAGTAAAATCCAAAGAGCATGAGG |
| | ACCAAATCAAATATGACAAAGACTCCTTAGAGGCGTGTCAGTACTGGTAACACCTGTTTTTCACAACTCACGGTGACTAAGGCAC |
| | AGACCACCCCACACAGTGGCACGGATTCTC[C/T]TCTTGAACAGACTTTCCCCAGGCTCCTCTGAGTCTCTTTTGAAATAGGCCT |
| | CGCCTTGGTCTGTAAGGATCTGAACACACCCAAACATAATTTCTAACAGTTCAAGGCTACATCAATAGATAACCAAGCCCTGTTA |
| | AAGAGCCAGCCTGAGAAAACTCACGGCTTCCAAAAGAATTCAGTATTTGTTCCAGCAATGTCTG |
| rs4724701 | CCCTGGTTCCACCGCAGGCGAAGTCAAGATCCAAAGCAAAGTCGAGGACACAGTGACCGTGTTTTTAAAACCGCCATGAACCAGG |
| | GCGGACCNCGACACCCAGATGAGAGCCGTGAGGACAGCACTGAGAATAATCACTTAGGGCTTTATTTACTGACACAAGAGGACTC |
| | CACGGTGTAGTGTTACATTTTTAAAAATCA[A/G]ATTACAAAACAATATGAGAACCCTATCTCCAGTTCATTCTCCAGGGAAAGT |
| | TGGCAGCATTCACTGTTGGGAAACCTTCACTTAAAAATAGGTTGATGTTGGCCAGGCGTTGTGGCTCACGCCTGTAATCCCAGCA |
| | CTTTGGGAGGCTGAGGTAAGCGGATCACCTGAGGTCAGGAGTTAGAGACCAGCCTGGGCAACAT |
| rs635546 | TCTGCCTGCCTGGGGCCACCACCCACCCAGTCATACACATAGGACAAGCTCAAGAGCCCTCCAACTCACTTAGTCACTTCCCCCA |
| | AATCAGATGTGACTGAATCCTATCGATTTTGCTTCCTAAATAGCCTGGGAACAGCCCCTCTCCACTCTGGCTGCCATTTTCCTAT |
| | GGAAATGACAGTGTTTCTCACCTAGATTAC[C/T]TTCACCACCTCCCACATAGCCTCCCTGCCTCCAGCCTTCTCCCTTCTTGGA |
| | TATGCACCAAAGTGACCTTTATCTAATACCCAGGGTTAATCACTTCCCACTCCTACTGAGAACANTTCAATGGCTCCTTATTGCC |
| | CCCCAGTTTCTCAAATGCCTTAGATCAGTGGTCACCAACCATTTTGGCACAAGGGACCAGTTTC |
| rs1884641 | ATGGATTTTAAAAGGATCTCAAATGGTATCTTCTAAAATTCTAAGCATTCTATCAATCCTCATGCTGAAATATGACTTGGTGAGT |
| | GACACTTCAAAAAGAAAATAAACATGCGTCTCAACCCATTACTACTTTATTTCCTCCAGATCATTTCCTCACAGGCAGGGCAGCC |
| | ACGTCAGTGAACCCACTCAGATATCTTGGT[G/T]TCTACCACTTGGAAGCCTCTTTTCTACATTCCATTTTGGGAGAGAGCTGGC |
| | TCTTCCCGGAGACTTGACAACCTGGTACCGTCTCCTCCCACAATCACCCTCCCATTCTTCTGGCTTATCTCTGGTGTCAGAGAAG |
| | AATGTAATCTTTAGGCGTGTACATTCTGACTCCCATGTTTTGGGGAAGACCCCTCAGCGTAGCT |
| rs9302822 | AATACCTAAGTAGGGTGATTGGAGGTCAAGGACCCTTGTAGGAATGAAGTGGATTTGCCTGGATGTAAAACTACATCTAAGATGT |
| | TATGAGTGAGGAAGAGCCCAAAACTCAGAAATCTGTTTGAAAAACTTTGTTAGAAAGCANACATACACATGCAATTGTTTTACAT |
| | AGAGGGCAATACTGCAAAAGATAATGAAGG[A/G]ACTATAAACAGTGATTATCTTTGTTGTAGCTGTGCAGTATGACTAAGAGAG |
| | GGGCAGGGAAGAGATGAAGCTTTTGCTTTTAAGATTNCACCTTTATTCTTTGTGATTTTCAGCAAAGATGCCCTATTTGGATAAT |
| | TAAAAAATANTTAAGAGAAAAGCCTCCATTTTGCAAACAACCTGTGATCACTTTACCCCTGAGC |
| rs3801033 | ACCTGACTACTGTACTTGCTATCATGCACATTAAGTGAAACGATATCAACCGTAACCCCTATAACCTGTGCTTTCCCTGAACCCA |
| | CTGCCAAAATATCAACAGATCAAATGAGAAAAAAATCTGAGAGACAATACTTTTCACCACCTGGGATCACTATATGCNGCCAAGC |
| | TAGGATGACAGTCATCTAACAAAAATATTC[C/T]GTTGCAGGAAAAGCAAGCTATTTGTTGCACAAGGAGGTTCCTAAGATAAGT |
| | CCAAGTAGAGAGTTGTTCTGGAGGAAGTGGGTCTCCACTTTACACCTTCTCATGTCACATCAAGCTGGGAGAGATAGGTCATGAT |
| | CTATCTCTTATCCTTGCCTTANGCTACGATCACTGTGTGCCTGATCAATGCCCAGCACATTTCA |
| rs2662090 | CTTCAGGTGGTTGAAGCTTAAATGAGGCGGACAGAGATGAGCTACAGAGCCCCAGGCTGTAATTTGCGCTAACCAGTGGATGACC |
| | TNCCAAGGCATGAGTTAGGCATTTGGGATTACATCTTCAACTTCTTGGAGCAGTGAGACACGGTGGACAGAATATCAGCTTACCC |
| | CTCAGCTCTGCTTTTTTGGGGAATTCTTGG[A/C]CAGGAGATAAAATGAGAGGACATTATTGCTGGAAGCATCTATAGAGAGCCT |
| | CTAGGACAGTAGTTACCAAACTGAAGTGTGCATTTGAACCATCTGGGAAGCTTGTTAAAAATGCAGGTTCTCAGCCAGGCGCAGT |
| | GGCTCATGCCTGTAATCCCAACACTTTGGGAACCGAGGTGTGCAGATTGCTTGAGCTCGTGAGT |
| rs279553 | TAGCTAATGTTGTTGCGGGGAAAGGAGAGAAGGCCCAAGAGAGAGGGCAAAANGCTCAGCAAATACGGGTATTCCCACTGATAGG |
| | GCATGGCCACCTGATCATGTGACAAGAGCCTCAGGTGTCCCACGCTCATCTTAGCAACCAGCAGCAGCCATATGACCAGATGTAC |
| | GTAGATCAGCTTCTTGATTTCATACTTGAG[A/G]GTCACACTGTGGGGCAGAGCAGAGGGAGAAGTATCTTTCAAATTTTTCTTA |
| | CCACCAACTATATGCCAGACAACTGTACTGGACACTGGGATACAAATTTGAATAAAACAGCCTAGAAGCCGGACACAAAGAACAG |
| | AGGAGGAAAAAGTAATTAGAAAATGAAGTGAAAAAGTTCTNGTAAATATATGTTCCCAGATATA |
| rs279542 | GTGTGTTGCTTGAAAGGTGTGGCCTTAGACACTAGGAGATGATGGGTAGAAGCTCCTTGAGAAACCTAGCAGTGGCCATAGAGAA |
| | GTAGACTGGGTATGGGGAACCTAAGTCATAGTTGTAACCTACAGCTGATTGGTAAGAACTATGGGCCAGACATTTAATCTCTCCA |
| | TCTATGAAATAGTCCATTCTCATTTATCTA[C/G]CTTAGGTTATGGGCTCTTCTTTTAGTTGGATATTCACATTTATCTTTCAGT |
| | GTTAACTGGGTATCAGTTATGAGTCTACTACTGTATAATGGCATCCAAAAGAATTTNAAAGTACCTCNGTTTATAGGGATTTACA |
| | ATTCAGTAGAAACTTGTTATTCATGTGAAACAGTGAACATAATATCTAATGTGTGGAGCAAGT |
| rs11250017 | TCTTATAATAAATCTATCTGTCTATATCTATATCTACATCTGTCCTCCTACTGGTTCTGTTTCTCTGGACAACCCTAAGACTAGT |
| | ATATAAAAAATAGANCAAACTTTCAGATTGAGAAAAAAGACATACAAGGCAAATGCATAAGAGATAAGTTTTATGATATATTGAT |
| | ATTCAACATCTTAACATAATTAAATGAAGA[C/T]GGGAAGTCATTGAAAGAACAAAGGAGAGTTCATGTTTACTGCTACAATGTG |
| | CAATGAAGATATAAGTTATTAATATTTTTGGAAATTTTAAAACATCTCTCCCATANCTATACAAATCAAGTGGACCAAAAAATTG |
| | AGTAAGGATGTGGAAAAACCAGCATTGTCAGTAAGCTAGAACACATAAATATATATTGAAGTTG |
| rs1013120 | CAAACTTAAAAATAACAATTTTCCCAGAAGGCCAAATGTTTAGGGAACATTTTCCCCCAGAGGACTCAGGGGTAAAACGAATCTG |
| | AAGACCTTAATTATTCAATGTCCCCAAGCCTCTCTTCCTAAACGTGGAATGNGGATGAGAAGGAATCACTTACAAGAGAGAGAAC |
| | TGTGTGCTAAATATCAGGAGACAAGTCGCC[A/C]AAAATTCTAGGTAATGGTAGTAAAGTAAGAATAGGCANCCTAAGGTATCAA |
| | AGGTCAAACGTGGTCCCCCAAACACCTGACCTGCAAACCTAGGCAGATAGCAGCTCTAGAGAAGAAGAAATGGCTGGAGCAGAGA |
| | GTACGTGGCTCAGTATATTAGACCTTATTTGCCACATAGATGACTTCCAAAAATACTCTTTTGG |
| rs11258903 | AAAATTTTAAATTAAATCCAAAAATACATAAAATTAACAACGTTCAAATTTATTGCTTNACCCTGATATTNATATTTTTTGGCTG |
| | AAATGAAATGCAGTTTTTAGCATGAATATGTTTCTGACTCCTCTTCTGTGGGTTCTTTTGAGATTGGCATGTCTATATTGCCCCG |
| | TGCTGGGTTAGGAGTCAATTCTCCTATNG[C/T]TTTTTTCCTACCCAACCTTCTGCAAACCTTGAACAATACAGCGAGAGGCCCT |
| | TAGCTTACATTTGGCAGAACCACATCATTTGTTACTAAGTAAATCTCTAGTCTTTCTTTGTTGGTCTGAAAGAAATATGGCAGGC |
| | AAAACAATCCTGGGCCAGTACTCAACTATGAAGTGGTCATCAGGTGGTCCCCAATCCTCTTAT |
| rs7645289 | AAGTCACTTGCTTTTTGTTTTTTTTTCAGTCTCCAGATTGAATAGGCAGACTGCCCAAATCTCCCTTTCTTTCATTTTTTCACTC |
| | TCTCTGTCAGAAGAAGGGGGCATTATAGGACAGTATTATTAGGCTAGATCTTTGCCTTGTTTTAGTGTCTTATCCACTGGCCCCT |
| | TCATAGGGTTGGGAAATGGTTTCATAAGAT[A/G]GTAGAAAGGGTGGCATAGGTACTTGCAGTATGGCTAACAGTTGTTCACCAT |
| | GTAGCTTTAGATATCTTAGACCCAGTTCCCAGCTGTGCTGCCTTAGTCACTCTGGTCCTCGTCTTCCTCAGTATCTCCTCTATGA |
| | GGTNGGCATCCATGCAATTCACTCCAATTGCTTGTACATTCTTACATTAAGTTTTGGGGGATC |
| rs6035712 | TGCCCGGCCTGTTCATCTGTTTTCACACAACTAAAGTTGCTCAGTTGTTGTGCTGGAAAGGACTTCCCTGCCCAAAATATACCAG |
| | CAAGACATCATGCAACCGGAGCAGGCTGTGCCACAGACCCTGGCATGCAGAGGTGTTGTGTAAACACAGAAGGGATCTGGGCAAA |
| | TGCATGCCTTCATTTATAACAGATAAAAA[G/T]AAAGAAGTGTGCCAGACAGTGAGGCACTGACGCTTCACAGGAGGGTTCCGAG |
| | AGCTTTCCTCCCTGCCTGAAGTTCCTTCTCAACCCAAGTAGCCACCTTGTCCTCGTGTTTGTAGTTCCCCTCTCAATCCAAGCAC |
| | TATCCTTGGCCTGGGGGGGTCATCATCACCACCAGCAAGGGTAGCACTGCAGNGTGACAATC |
| rs7307064 | TTGAGAAGAAAAAGAGCAGTTCTTTTGGGGGAATTTAGTTTTGGTCATGCTAATTTAGATACACATTTCTGATAAACAATTAGGA |
| | GTATAANTTTAANGTTTAGCNGTTAGCTAATTAGATATGGGAATAATGTTTTACACTTTGGCAGCAGATCCACAGAGACAACATA |
| | AGTCATGGTAATACTTAAGCAAGGGTGATA[A/C]TCATAAGGGATCAAACCATTTAGGTTGAAAATAGGGCAAGAGTCACAAATC |
| | AGGTAACTTCAGTGGCCACCAGGTAACAACTATGTGGCGCTATCTGGTTAAGAAAAGAGGGGCCCTTAATAGAAAGGCGTATACA |
| | TCCCGTTTAAGGCATTTAAATCNATTTAAAATATATAAATAAATAAAAACAATGCCCATAATAA |
| rs2270101 | ACNAAGGGGCAGACACTGAGACTTCAGCAAGTTAGGAGTTTGTCAGTAAATTGGAACCAGAGTTGTTTCTTTCTGGGCTATGCAG |
| | TTGCTAGATTGCTCTCTGCTTTAGCCTTGCTGTCTAATTGTCATATGTAGGAATCATGCAACTGCAGAACTGTGTACCCTGTCTC |
| | TTAAAGCAGCTCTGTAGTGGTCATTCTGAG[C/T]GAATTAATTTAGGATTAGCTCAGAAATAACTAATGCCTCCNGGGTAGCCAG |
| | AATTGCAGTCTGCCTATTAACATTTGCTTTGTTCCATTGCTTTAGAGTCATATTCAATTTATCAATTTCCCTCTTCCAGTTTTTG |
| | GCATGGTATCCTTTTGTCCCTTTCTCCTGTATCATAACTCTCAGGGAGCCTAGCTTGCTATGTG |
| rs7788668 | CTTTTTTTTTTTTTTTAAGAGATAAGATCTCGTTATATTGCCCAGGCTGGTCTCAAATTCCTGGGCTCGAGTGAACCTCCTGAGT |
| | AGTTGGGACTACTACTCACCACACATGGCAATAAAGATTCTAAAGTTAGAAGGACAAAGTGATGTTACCTAAATTTGCCTGTGCT |
| | TCTGATATGACAAATAATCCGCCACTGGTG[A/C]ATGGCCCATAGAGCTCATCTTCATCTTTGGATGAATACGAGTGGACCTGTC |
| | ATACTCCTCAGCCCTATGACATGTAAAGCACAAAGCCAGGAATGAGGTCATTGTOTTATCACTTACCCCCAAAAGCTCTCAATGG |
| | CTCAACTTACCTAAGTCTTCCTCCTTTATTCTCTTCCTTCATATCAAAACTTCTGCAAATTTTT |
| rs1891877 | ACCCAGAGCCAAGGGTAAAAGGTCTGGGCTTGTTATAATTTATCACCCATCTCAAATAATTGGCTATCATCAAGAATTAGATTCA |
| | TGCAAGAATCACTTAAAGATTCATTTGTCTGTCACATTAAAAACACTAACCTATCTTTTTCTTCTTCCTTAGCAGATTTTTCTTC |
| | GAGGAGCACAAGGGTGGGTCGGTGGAAC[C/T]CTTCAGGAGCTAGGGTGTCGGAGGTGGGGGACTAGCCCTGGTCCCACTGTCCT |
| | TCCTCCCCTCCTCACTCCCCAAGCTGCCCCTACCCCCTCTCTTCTCCTTGGGAGCAATCCCCCATCTCCATGCTTGTGACACACA |
| | CTGAGCTTACTTCTGAGCACTCAGTTAATAAAGGCCTGTACATTGAAAAATATTTTTAAAA |
| rs7350731 | TCAGCCTTTCTAACCTCACAACTTACTTCCAGACCACAGCATTAATCCATGCCCTTTATGCTCCAGTAAAATATTTTAAAGTCCC |
| | AAAAAGTCTTCTCTGACCCCTGTNTCCCCCAGGATTTGATATGTATCCTTTGCACCTCTTGTGATATTTACCTGAACATAGCACT |
| | TATTGAAATTGTTTAAAGTTTTTCTACTCA[A/G]TGAACTGTAAACTCATTAAGAGAAGGAACGATGTGCTTTTGACTGTTGTTT |
| | CCCAAGCACCTCTCAAGGCAGTTGGCACATTAACGTGATCAACCAATATTAGTTGAGTAAATGAAATGAGTCCCGGGGGACTCAC |
| | ACTAGCTTGAGGGTCATGGGCCAATTCCAAACTCACTGTCTGTAGGGGGATAATGAGTCTGATG |
| rs4795069 | CTGGGAGCTATTTAAAAATGTAGAATCTCGGGCCCCATCCTAGACCTTCTGAATCAGAATTTTAGCAATATTTCCATGTGCTTCA |
| | TATGCACATTATATGTTACAGTTTGAGAGGCATTGTTCTAGAAGGAGCTCAAAGACTCAGGGATGTGAGAATATTGAAATGGAGC |
| | TACTATGTGCAACACGCTTCACACTACCC[A/C]CCTAGCCAGAATCCCCGAGCAAGCCCAGGGGATGCACCTATCACCAAGGAAT |
| | TAAGACATGCATTGGAGAGGAAGGTACTAGCGTGCTGGAGTGAGGGGGGAGGCAAGAAGACACNCAGGATACAACATTTAACCNG |
| | GCACCCACCCTCCGGTACTGATCCTGAATGCATGAGCCTGAAAGTGAATGCCTCCTTTAATA |
| rs4544214 | TAAAAATGCATTAACGTCTTTTTATATCCATCAAGGGAAGGATGAAATGTTGAATTTGAAGACTAATTCAGTAAGAAGTCCTAGG |
| | GGTTTAACTGTACATACTACCTGAACTGGCTTTTCTGAGAGATGAATCAATAATGAAACATGTCTGTTTTAAAAACTACCACATG |
| | TGACTCCTATTTTTGTTAGCTGAAAGCTGC[A/T]ATACGGAGTATTACAGNAATGTGAAGGTGACTAGCTTGAAGGTAGGGTAAC |
| | TAGAGAGCCAGAAAAGTTTTGTTTTAAACTTGATTTAATGCGTTTTTATTTTTTCTTATACAAAATAGAGATAATGTTGCTAACT |
| | TCATGGAATATTTGAGGAAATGATATGAAAGTGTCTGGACGTGCAGTAACCTCATGGNTTCTTC |
| rs584762 | GATGTTATTGAAAAAGATTGGGAAGATTATGGGTAGTAATAGAGATAATTGCAAAGGAGAAACAAGAAAAAAAATTAATGAATCT |
| | TCCATCTCAGGGAGAAATAAATGGCTTTATTATGGGGTCAGGAGGGATGATCCTAAAATTCCCTGTCCAAGAGAAAATGCATAGT |
| | GGTAGTTTGGGAGTTGGAGAATTTGGCANC[A/C]ACAACATCCATGAATCAAAACAGCTTTTAAGGGACAACCTCAGGGGATTGC |
| | ATTTCTATAAAAGGAATGAGATGTTTTTCTTTATCTGCTGAAAATGCAGAATCAGAGCCGACTAGAAGCACAGCTAGCTCCTTTG |
| | TCATTATATGCAAAGGACAAGAAGAAACATGATGTTCCACTATAATAGGCCATAGGCAAAAA |
| rs761453 | CAAGTAAGTAAGGATGTGTATAAAGACCCTAGCCCATAAATGGTCATCACTAAATAGGTAGTCATTATTTATCATTGGNATCTTT |
| | ATTTGTGAGCTGCAATGGATATGTAAATAAATATAGGTATGTATGCATGATGCACAGGTATCCACCTGTGTATAGCAGTTGCACT |
| | ATTTCCCTTGCCTAAGGAGAAACTGAAATG[A/G]TAGTTTAGGCCAAGAGATGATTCAGACCCATGTGTATGACTAATTACAGTA |
| | CTTAACAAGAAATTGTAATAATATCCATTGGTATAGCTAGAGGTATGAGTTTCTGCTAACTCAGGATCTAGTGTCACCTTCAACA |
| | AACTCCCCTTATTCTGAATGTATCTAGAAGCTCTAAATGCTTTGCTGGAAACTGAAAGGGTAGA |
| rs12583395 | AAAAAATAAGATGATTGGAGGACAATCAGTAGTGTCTGTGACATCTACAACGGAGCAGTTGGAGAGGAGTAGGCAAATCCCTATC |
| | TACTGGCAAGAAAGATGTCCAAGAACATTTCCAAGTGAGGACGCAGGTTGTGAGGTCATATGTCCATTATCACCCATCTAAGGTT |
| | CTGAAAACANACATTTATCAAGGCATGGAG[A/G]AAGTTCTGGAAGTTACACTCTTTTTCTCTCAGAGAAAGCTGGAATTGGGGT |
| | TTGGAAAGAAGAGGAAATATGTCTATTTACTCAAATACTTCTGAATTCTTTAATTGTTGAAATCCTCTAAGAACTTGTATTCTGC |
| | GGTCATTTTTAAATACAAGGGAAAAACAAACAAACAACCCAGGCTGTAAGGAAGAAAGTGATA |
| rs2070439 | TCAGCTGCTTGGGAGGCTGACATGGGAGGATCCCTTGAGCCCAGGAGTTTGAGGTTAGAGTGAGCTGTGGTCGTGCCTTTGCATT |
| | CCAGCCTGGGCAACAACGAGAGACCCTGTTTCAAAACCAAAAGGGAGAATGGATTACCACAGGGGCTCGACATGATCAAGTCAGT |
| | TTAGTAGGAACGACATGTGAGGCATGGCCC[G/T]GTCACAGGCATGAAGGTTCAGAATATAGCCTGGAGTACACATGTATCCCTC |
| | TGGGCCAGGCAGAGGCTTCACATCTTGGTGAAAGGCCTGGTCGCACTTTCTCTGGGTTTCAGATGGACTGTTAATGCAAAGTTGT |
| | TTTTGTGTTTTTGCAAATCCCAGGAGCTGGTGGATGGGGATGGTGTGACCCTGTTGGAACCTGC |
| rs8095186 | ACTTAATACTGGGGGCAAGANGGTTCTTGGCTGGGCACACAATGCTATGGGAACTTAAAAACAAATGGACTAGCTGCAGGTTTAA |
| | ATAATGCTACAGTCCTTAGACACTGTATATTATTCATAGCTCGTTGAACTCTATTATCTCATGTGTTCCTCTCAGTGGCTCTGTG |
| | AATTACCCAGGACAGGAAAGAAATGATAGA[A/G]TGTGAAGATAGAAGAGTCAGTAGAGGTCAGAACCCTTCCCCAGCCCCTCAG |
| | CTTTTTTTTTTTTTTTTTTTTTTTTTGANATGAAGTCTGGCTATGTCACTCTGAAGTGTCGTGGTGCGATCTGGGCTCACTGCAA |
| | CCTCCGCCCCCTGGGTTACAGCGATTCTCCTGCCTCAGCCTCCCGANTAGCTGGGACTACAGGT |
| rs583338 | TACTTTCCTATCATCATCTACCTTTGGGATATTATGTCTTTCTTAGTAAAGTGTCGCTACAAGACTTTTGTCCATTTTTTATTGA |
| | AATGTCTGTCTTTTAAACATTGATTTTTCTTTAAATATTTTGGATACAATTCCTATGTCAGGATTATACATTGCANATATACTCT |
| | CTAACTTCTACCCTGTGCCTTGCCTTTTTT[A/G]TTCTCAAGTCATCTGTAATTTGCATTCTTCCGTCTTTTTTCCCGTCAATGT |
| | TATCAGGAATTGTATACCTGGAGAGTATAAACCATATACTCTTAAGCACATTTAGAGCTACTTTCTGTAGATCTTGATATGACAT |
| | GTTATCATTATCATTCAGTTCACAATATTTTCCTCTAATTTCTTTTTTTAAATTTTATTTTA |
| rs2228246 | TTTGCCGAGTGTCCCTTCCTGAGTTCCAGCAGTTCCTTCTTGACTACCAGGGGGTATGGNTGGGCTGACATTGGCCCAGGCTGGT |
| | AGGTTGTGGGGGGCTGGGCTCATCCCTGACTGGAGGCTTCTCTCATCCCCTGCCNTCCCTACCCCATCAGGAGCTGTGGGCTGTT |
| | GATCGCCTCCAGGTGCAGGAGTTCATGCTC[A/G]GCTTCCTCCGAGACCCCTTACGAGAGATCGAGGAGCCATACTTCTTCCTGG |
| | ATGAGGTGAGCCCGATGTTTCACCCATTTTTTGTCAAGAGAATGAGTAGGGGTGACCAGGACCCCACCCGGGCTCCAGGAGCTAG |
| | ACGCTCCTTAGGGATGCCACCTTGTTTCTACCTACTNTGCACCTTGCCCACCCCCAGTTGGGAC |
| rs2664537 | CTGTGTCTATGAATATGACTATGAACTCTGAACTATTTTATCCATTGGAAGGTAAAGGAAAGGTCCTACATTGTGGGAGGAAGAA |
| | CTGATGGAACCCCATCTTGCTTGCTGCTTGCTTGGTGGTGGGCAGGCCGAGGGTAGCGGCAGGCTCTGGGCTGTCTGCGAGGATT |
| | CTGGAAGCTCTCCCAGGTGCCCAGCAGCC[A/G]GGCANGGGAACGGCATGTGGCAGCAGAGAGTCGGGTTTGGCTCTTCCACGTG |
| | GCAGGCGGTTTCCCAGACTGGCCAGTCTTCACATTAATCAGATCAAATTCAGTCTGTTTCTGAGAAGAAAACACATGCCTGTCAC |
| | TCTACGGCAGCTGCCACCACCTGCCCCCCAGGCAGCCTGGTCCTTGCTATACCAGGGTGGCA |
| rs6072317 | AAAGTAATCTTCAGTTCTTCCTCACCCATTACTTATATATACAATATATTATTATAAAGGAGACAACACAGAATATAGAAGGCAG |
| | ATTTCTAAGTCCCCTATTAGAGGTTTATAATTCTTTTATAAAATGTTATCTTTTCTCTTCCTCAACACAACAAACGAACCCCATT |
| | AAAGTCAAAACTGANAACTCTGGCCAGGA[G/T]TCTGTTATATGTAAGATGCCTCCTTGTTGATGTTGCTATAGTCCTAATTAAC |
| | AGTCGACAGGACATTTCAAGACTTCTCACTCTTATCACCAGTCCTGGAAAAGTTGTGTTTTTCTATAACTGAGGACATGGAATCC |
| | CATCTCTAGGGCCACACAGGATAAACCAAAGCCAACCTTGACCTTAAGGAAATTTGTAAGGAC |
| rs607234 | CAACCAACTGGAGAGGTTTTTAAACTCCCAGTATCCGGGGCATCAGTATTCGTCTAGGGCACAGTGATTCTAACACACAGTCAAN |
| | GTTGAGAACCACTTATTTAATTCATCCTGTAAATCCTCACAATAGAATCCTGCAAGGTAGCTTTTATCACCACCTTTGCCGATGA |
| | AATTGANGCTCAAAGAGGTAAATTGATTTC[A/G]GCATCTGTAGCCCCAACCTGTGACCTCTCCTTCCTTCCTTCTCGGGCTCCC |
| | TTCAGGGATTTCCTGATGTTACAGAAAATGGTATTATGACGCTGCCCTCCTGGCCACCTTGACATAGCTCTGCTCCCAACAGGGC |
| | TCTTCTGAGATAGCAGCCAGACACTACCTGGGATCAGGACTGATACTAAATGACTTCTGCCAA |
| rs4518023 | TGTGAGGCTAAAGGCTCCCACGCAGCATGGGGCATGGGGAGCCTGAATGTAAGCCCCAGGGCAGGAAGTTTTGCCTATTTGCTCA |
| | CCGTGTAATCTCCAGCATCTAGAATAGCATANTAGGCCTTTGGTAAATATCTGTTGAATGGAAGGACTAAAATTAGTTCTGGAAG |
| | TGTCTGGGGATGGGGCTTAAGTTACCTCTG[A/C]AGGGTCTCCAAGGCTAAATCCTTTTCCTGAGTTAGAAAAACAGGGCTGTTC |
| | TCACTGAAGTTTTGGCCTTCAGAGTGTGATGAGGAGTGCANAGGGGCACGGGGCAGCTTCAAGGACAGGGCTGGGACCACAGAGG |
| | GTGAGAAAAGGGCACAAGGGAGGAGGGGTGCTCCCAAGATGGCAGCCCCTAGAGATCTGGGCTG |
| rs7146332 | TTGGTTCTTTCCCTACCCAGCAGCCCTATACCTTGCCTTNATGCTATGTATAGCTGGAGTTTATCTCATACCATGAATAGCCAAG |
| | CATCACATGGAATATATCCTAAGAAATATTCCATAAAAATGAACTTGATGGGATCATGACAGAGATGGCAGATCTACAAATTTTA |
| | AGAATTGGAGACTATCTCATAGACTTTGTT[A/G]AGATCACAATCAGTTCTCAACTTCAATGTGGTACATTTACAAGCATTGCAA |
| | ACAGTGTGAGATCCCAGCACAGATGTCAAACCAGAAATTATGTGACTTGAATGGCTTGGAATAATGGCCCATTTGGGGCATCCAG |
| | CACTTCCACTGTTGGGTAAGTACTGTTGTCAACAGTCACACTGTCCAAGTGGATGATGCACCCT |
| rs2088138 | GTGTCACAGACAGCCCCCACCCCAAGCTCCCTTCCAGGTATCCCCATAAATCATTTGGGCACACTCCCTCTTGGAATTGCAATTT |
| | CCATCTTCCACTTATCCCTAAGGAGCTGGCCCTGTGGAGAGGTGTGTTGGTTGTTTTGTTTTTGCCAAAGGCCCTCGCTCTAGGT |
| | GCTCCTGTAAAGGTACCTTGGCCCCTGATA[C/T]GGGATGAATGGATGAACGAAGCCCCAGATGCTCCAGTGCCAAGGAGGTCAG |
| | ACCGGGAACAGGCCCCCACTCCCACACCCTGGGATCGGAGCTTGCTTGGTTCTTGCCATCTTGCAGGATGACTTCGAGTCTGGAG |
| | GGAGATACACAGTGCCTCTCCATCCCTGGGGTGGGGGGAAGGGATTCTGCTGGGACTCTTGAGT |
| rs4810622 | TAAAAACAAATCAAGAGTTGGGCCAGCTGCATGGAAGGACCCAAGAGGATTATTTAAATGGCATGCCAAATTTCACCCATGCCAC |
| | CCAATGTCCTCACCAAACAGGCAACCCAACGGGAGCTGTTGTCCTCTGGATAGCCCCAGATGGGTCCCTAACTCTAGCTGCTTTC |
| | TCACCTGAAGATGCAGAGCACCCACTGACA[C/T]TCAGAGGAGCTTGCTCTCCAGAGGCCCAGCCATCCCCCACTTCTTTACAAA |
| | TGCCCTCCTAGCTTTACTTACTTATTCAACAAACATTCCAGAGCATCTACCANGTGCACAGACCAAGTACCATAGAGAAGGCAAA |
| | TCCTCATAAAACGGCCTCCCTGCCCTCAAGGAGCTTCCAGTCTAGATTGGGAGGGACACCCCCA |
| rs2839178 | CACCCTATAAATATCAGTTGACATACAGAGTAGCCACCACGTCCCAATCTAACTCCTGACTTTTCCCCTTATATTGTATGTGTGT |
| | GTGTGTGTGTGTGTAATCAAGTATTTCTGAAATGCAGTATAATCCAATTAGTCTATTTTAGGTATTCATTGCTATAACATTTTCC |
| | CTCATCCTTTTACCACTGAATCAGAAACT[A/G]ATAGCTCATATATTTTGAATTTGTTAAAAGACTCTTCCCCGTGTGTGTGGAT |
| | TTTGCCTGTAGGAACACAGGACTCACCGCTGTAGATACTTGCAGAAGCACTGAAGCTCCTGGAGGGTCTCCTTTNCAGTCTGGAA |
| | GATTTCCTCCACGAGAAACAAGTCCACTAAGTGGGCACAGACATCCTCACAGCAACGGGCCAC |
| rs12589623 | AATCGTAGCAACAAAACAAAGGCAATTCCAAATTCAAAAAAATCATTTTTAAATTCTGCGTCTCATCATGCATTCTGATTATGTA |
| | TTAGTAAAAATATGAAATCCCACCTGGGCTTAATGCTAACTAAAATTTTAAATATTATCACTACTTTACATTTTTTAAAAAGAAT |
| | AAAACATTTTAAAAAGCATTATGTAAGAAA[A/C]GCATGGAGTCAGATTTGAGTTGGGAACTGTTATTATGCTGGTTCTTTAGGC |
| | TGTTGTTTTCTAAGGGAACTAAANAACTCAATTTTCTTATCCTCTTTGGGTGAGTGGTGCTGTAAGTTTGAAGACTAATGTAAGG |
| | CTCTAGAGTCAGAAAGTATTTTATTCCATACCTAATTTTTCCACTATGTTTTGTTATTCATTTT |
| rs2414660 | TAGTTTTATTTTCAAAACAGGAACATCCGGCAGAATCTCAGCTTTCATTTTGAATTCAGNGTTCCCGCTTCATCCATTATTCATA |
| | CACACTGCACTTTCCTGGTTTGTGATTTTACTAAATTTCTTCATTTGAATTATGGCCTTGTGGTCAACAGCGGGCAATATATTAT |
| | TCTTATATAATTTTTAAATACAAAGGCAAA[C/T]GGCACGGAACAATTAGAATCGATGGCTTGGGAGTCTGGCACTCAGATGTCA |
| | TAGGCAAATGCTGTTTTCTTGACTTTAACCTATGGGTTCCACTTCATGTGGGTTGTATTTTTCATACATCAGGAGTTTTTATAAA |
| | TTTCCTATTCAATCCAGCAGCCCTACTTTGTTCGCAAAATATAAGCAAAACAAATATGTCAGGG |
| rs1630535 | TGACACTGAAAAACCCACTCAGTCACAGGGTTAAGAAACTAATAAAATTACTATTTTTCAAGTCCTTAGTACATATTTAGCATGA |
| | TTCTAGGCATGGCACNGGCAGAAGAAAAGTATAAAATATNGCTTCTACATATAACTTACNGTTTTACTAAGGAGATGATTGGGTA |
| | AAGACAGTCCATTCAAATGCCATAATCAAC[A/G]GTGCATAGTCAAGGGCCAGCCACCAAGCAGCTGGGAGAGAGAACATTGAGC |
| | TAATATTTGGAATAAACCAGGTTTGCCAGTCAATTATCAGAAGTACCTGGTTGGTAAGGAGTCCTGCAGAGAAGAGAAGTTGTTT |
| | TCTGACAGCCTTAAGCAGTTGATCATGCCTAAAGACAACATTATCAATGTCCACTAGGCTCTTT |
| rs6868846 | AAAGAAATATGGATTGGCTATCAAGGGACTTCCACCACTAATCAATATTGGACAAAGATCATCTCACTTCTCTGTGTGTCTATGT |
| | CTTCACTTTTAAAGTGAGAGAGACAGGCTGAGTGTTTATACTAGAAAAAGCTTTAATTTCAAGGAAATCTGACTAGAATCCCAAC |
| | ATGGAAAAACAGATGAAAACCGGTTCATTC[A/G]TTGAAGCAGAGATGGGGGCCGGAAGGAACGTAAGGATGAAATGGAGGGATG |
| | GGGGAAATGGAGAGGTCAGTGAAGGTNTGACAAGTAGAAGCAGCAGTGGCAGTGACATAGTTAAACTGGGAAACAAACAGGATGT |
| | GGCAACTGGAAGGCAGGCTGTCTGAACTAGGGATTTTGGAAGCAGACCGGTGTTGCATCTTAAG |
| rs7901463 | TTAATTTATCTCTCATTTGTGAACACTGTAATCATTTCTCTATCCCACATTTATTTAGCTCTCAAAGCTATGCTATTTTATTGTA |
| | CAATGACTAAACTACTCAACATGAGAGATTTGGGAGGATCTTTGTGGTCAGCTTATTATTCTTTTCATTACCACAACAACAGCAC |
| | TACAAACTCTTTTTCTAAGTGTTTTCCAT[C/T]TATGATCTCACTTTTGTGGCTAGACCTCACCTCTAGCCCCTGGGAATTTCTT |
| | CTGTGAACGCAGCAGGATGACATCCCTCAAGTCAAATTCAAAGCCTTAAAGTAGATCAGCAGATCAGGGCCCCCTAATGACTGAT |
| | TACACACAGCTCTGACCCCACACTTAGCCCCGAGCTTGTTGTTTTCTGCAGCCTTTTATCCC |
| rs356999 | AGGCCTAANGCCTGACTGACAAGCAGCTGTTTGAAGGACACTGTCCATCCAAACATGGATTGTACNGTGGACATACTGTCTTCTC |
| | TGGAGTTACAGAGGGAGTTGGGTTCATTGCCACCCTCATTAGGTCACAGAAATCCCAATAAGATAAAATGGAAGATGCTACCCTG |
| | CCTGAAAGTGCCCAGCATTGGTGCAGGATGC[C/T]GATGGGTACTCAATAAATGGACTGCAGGTTGACTTAGTCCCCCTTCCCAA |
| | GTGGGCAGTTTAGATTCTAAGTACTTTCCAGTTGGCTGAGCAGTTTTTCCCAAGAAGTAGGCTCCTTACTGTTCCTGATTTCTTT |
| | TGTCTATCCCATCAGAAGCAGGACAATCAAGGCAGGTCTAAGAGAGAACTCATGGCAGGAGCAGA |
| rs17175096 | TTGTAACAGAAATAAAATGAATGTCATTGTTACATATTTTTTTGGTCCTTGTTAGTTCAGCAAACTTCTCGTTTCCTCCTCCTGC |
| | TATGCTGTGAGATGCATATGATGTCTATGGAAGAGCGGGAATAAAATGGTTAAATTACACCAACCCCACTCACCTCTGCTCTTTC |
| | CACTGACAGTGAACGAAACCATAGTAACCC[C/T]ATAAGAAGGCATCTGTGAAGAAAGCTTTCCTGTAAATACACCCAGTAAGTT |
| | AAGAATCTGTGTTACAAATGCAGAGACACAGAATTCTCTGAAATCACTAAAAAGAAACCTGACCAAAAATGAATGAATGAATGAA |
| | TGAGCCAACAACAAACAAAGTGAAGGGAGCTGACAGTCCTAGTACCTTGCAGTTTGTGACAACT |
| rs4939517 | TGCTCTCCAGCCTGGGGGACAGAGTGAGACTCTGTCTCAAAAAAAAAAAAAAAAAAGAAAAGAAGGTCCAAGGGCTGCNGGGAAA |
| | AAGCTTCCATGAAGCTGGCAGGAGAAAATCATGCCACCAGCCTCCTAGAAGATTTGTGACTCAACTACTTAACTCAGAGATTTGC |
| | TACCCAGCCTCAGAACTGCCTCCTCAATTC[C/T]TCCAAGGGCAGAGGACGTTTCAGATCACCAGATATTCACCTAAAACACTCT |
| | CCATCCCTCAGTGAAATGTAAGAGATCTTGATCAGCAGGCTCACTCATCTGACAATATCTACTTCCACAACTGTTTTTTTTTTCT |
| | TTGTAAGAGGAAAAAGTAAATGCAGTCCGAAAGGATCTGTAGCCACACCCTAGAAAAGGTCCTG |
| rs1037448 | GAGCCCTGGGCATGTGAGAGTTTCATAAGGTACTCTTGACCAACCTTATGTGTTGAAAAACAGCCTTGTCCAAGAGTCAGGGGAC |
| | TCTTCAGAACATTCAATTCACCTTTGCCCCAAACAGGCCTACCAGGGCTAAAACAGGTAGTTGAATGTGTCTCATCATTAGCTAT |
| | TTGGGCAGGTGGATGTTGATACAGGTTAT[C/T]CTTAGGCATCAGTGCCCCATGGCTAATGCTGTAGGCAGTGGATGTTTTTGGA |
| | AGTAGCCAAGCAGGATTGCTGCTTGCCCTTGAGTGCTCCATGCCGTCTGCCNAGCTCCCATCACTTTAACTAGGAGAACCGGCCT |
| | CCAGGATCCCTCCCTTTGGTTCTAACATAGGCCTCAGATCAGATCCAGTGTCTGTGGTTTCAG |
| rs2244057 | TTGCCCCCCATAGTTTCTGAGAGGGCTCTTCCTGGCCCACTGCTTTAGTTACCACTCATATTCACATCTCTCNGACTTCTCTCCC |
| | ACGCTTTTTCTCAAGATATGTGAGATAAAACTCAACATTTTCCTTTGTGAACATGCCCCTCTGCCTGTATGCCTCATCTTATTCG |
| | ATGCTAACTTCTCTACCCAGTCACCGAAGA[C/T]AAAAATGCAGGCATCATAATAATCTTTCTTCTTTAATTATTCATACCCTCT |
| | CCTAGTCTTTATCATAGTGAATTGATTAAATAGTCATGCTCATTTCCTACTAAATATTTTTTGGCATCTCTCCATCCTCTCTCCT |
| | CTCACTCATTAGTTTACACTTTTTCACCTTCTGCTAAAACCATTGCAAGGCCTTCTTAACTGAC |
| rs10997044 | TGTACCAAAAGTACCCTGTCTTTTGCCCTCTCTTCTGAGAGAAACATTGCATTTTTCTGCAATATCTCTTCCTCGTGTCCTCTAT |
| | CCTACATTTATAGAGTCTCAAATATGCTCAGCCTCAAAATTAAGATGCTTTGAGCTTCCAGAAAACACTACACAGATAAAGGTGG |
| | CTTTCAAAAGAGATGTTTCTTATTGTCTAC[A/G]TAATCATGCAGAGTTAAGCAGTCACTGCAACCTTTCATCATTTTCTACAAT |
| | AAGGCCAACTTTCCAGATAACCACTTAGTGAAACAAGAATCCTGTATTTCTATGGTGGAGCTACTGCGGGTCTCATCCAACCTCC |
| | TGCCATGTTTGGGCCACTGACTGTTTGGGCACTTACGTCCAGCTTGCGACGATGGAGCCATGGG |
| rs9949324 | GTGGAGTTTCTCTGTTTTCCGAGACGGCTTACTCGGCGCCTAGTGAGNCGGTGCTTCTGTTTTTGTCTCTACTCCGTGTTCTGAG |
| | TGCACCCATTTATNCCCAGATAGCGTTTATACTTACAGAGGAGACAGGCGAACACTAAAACACAGCAGAAATATGACGAAACACC |
| | CTGCAACCTTGTTTCTTTTGAGTTCCTATC[A/G]CTCACTTCAATCTATTCTAAAAATAAAGGACTTGTCAGGCCTAATGATAAG |
| | GGAGAGTTTTAGGGAAATAAAGAGAGCTGAACTGACACAGACATAATAATGTCAAGATATAAATCACAGAGTCCTTCTGCCATTT |
| | TCATTATCTGCCTCGGAGGATTACGGTGCTTGCTATAAATGAGACGCTATGGGGACTCTGCCCN |
| rs618670 | ATTAAATACCAGTTTATGAATATTGCACCNTTAGGGCATTATCTTTTGCCAGCTTTCCTGCTCACCACTNCCTTGTCCTTTATTC |
| | CGAATGTGGACACATGGGTAGGAGGCCTGCAAACCCGTGATGACATTTCTCAGTGTGTGGGGCCATCTTGGATCCTGGCAGTGGA |
| | TGAGAAAGGCGTGAAATGGCAAGGAACGGC[A/G]ATGGTCAACTGAACAGTGCATGGTTGTCCGTGGGTTGAGGAAACGTGATGT |
| | CCGTGGATGTTGTTTGCTCTTTTCCAAAGATGCAAATGCNGCTGTGAATACGGAACCACAATTTGACCTAAAGACATGTCTGCAC |
| | TCACATGCCAAAATAGTTTGTCATTTGCTGTCCTTTGATAATTCCATGTAAAAGACTATCTCAC |
| rs4799159 | TTTATTCAAACCAGAGGACAAGGAAAACTACTGGATGAACACGGTTGTCTTGGGAAGAGACCTGCAGGAAGCTGCCCCAGCAGAG |
| | GTAACCCGGTACTAACAGCTTGATTCTCATAAAAAGGTGGCAATAATCGTGAAAGTGTGAGAAGGAATGTGGCGTTATCCATTTA |
| | ATCCCAGAACTGAGGCTGGGAGTTGTCTC[A/G]CAGTGACGTGGGCCAGGCCTCTCCCCAGCAAGGGCGATTAAAGTGAAACCAC |
| | TTAGGACATTTGGTCTATTTCAGATCCCTGCCGGTAACCTTTTCCTTCTTTTCACCAACTCTTTTCAAACTTAGGTTTTTTTTTC |
| | CCTTCTGTCTTTGTATTTTCCCGTAACATAGCCCTCGGGGATGTTTACTTAGATTTCCCTGTT |
| rs10490832 | AAAAATTTCGGCCAAAGACAGACTTCAAATAAGAGGTCATTGTTAAGGGTTTTAAATTCAAGGAGACAAAGTGGCACGGTAACAC |
| | ACATACACAATTTAATCGGAAAAGAAATTACCTCATAGCCCAGTAAATGTCCATTGCTCAACTTCCAAGGAATGGTGTTCCATGA |
| | AACCTCAATTTCTGAGGAAGATAGGCTATT[G/T]GCAGAGACTTGAGATGGGGCCACTGTAGGCTCTGTTCGGAAACAGAAATTG |
| | AAATATGATGATAATTTTGGCAGTTAGTTTAAAACACAGATTAATGTTCTTATTTTTATAAAAGCATTTTAACGTATTTGAAAAT |
| | TGTATGAAATATTCTGGCACCATATGTTGAAAATAGAGACACTGGTCCATTTCCGTTTCTTAGG |
| rs1545384 | TTTAGGGAGCAAACCAAGGTGGTATAAGAGAGTAGATTGCTACAATGGAATGTATGGAAATATAAACAAGTTANAAACCATACAT |
| | GACTGCAGTCAAAGATTTCTGTAGCCAAATAAACAACAAGCTTCCTCCTGGGCATTTATGGTTTCAAAAATAAATAAGGGCAGAG |
| | ATTACAGTCTCAGAGTCTATTTACTTGCAC[A/C]AGGGTGACACTTCTTTTTATATCCACTGCTCAGCACCAGCTCAACTCTTTT |
| | CTCTGGTTCCAACCCCTTTGCAATTATCTGCCTGAGAAGAAGAGGGACACATGTGGGTATCTAGTGGGAGATAAATGCAGCATGA |
| | CAAGCGGATTACCATGGTTGAAACACTTTTCTGAACACACTGGAGCTTAAAAAGCCTAAAGCTN |
| rs649867 | TGTGGGGTGTCCCTGTGTCTCCGGGGTGACTTGGGCCTCCAGAGAACCCCTGGCACAACCTCCAGCTGAAAACAGGAACAAAGAA |
| | AGTGAGCTTAACATTCCGGCTGTTTCAGACAATGTGTTTCTCTTTGTGGGGGCAAGGAGGGCAGGGAGACACCTGAAACCATTTT |
| | TATTCATCAGCTCAAGTTGGTGGGTGGCAG[A/G]GTCATGTTGAGGGAAAAAAGCCAAACTCTGTAAAATATTTAGAGAGGTTTC |
| | TTCTGAGCCAAATATGAGTGGTCAAGGCCGAGGCACAGTCTCAAGAGGTCCTGAGAACATGCGCCCAGGTTGGCTTCAGACATTT |
| | AGGGGGACAAAAGTTACAGGCAGACGCCAATCAGTACATGTGAGGTGTGCGTGGGGTTGGTCT |
| rs2279103 | ACTTTTCATTATTATTTTTTGTAAATTATGCATTTTCACTTGTAGAAATCTCTTTCCTTGTGGAGACTCAATGGTTTGCATTATT |
| | GATGATCGAGAAGATGTCTGGAAGGTTTGCCCCCAATCTGATAACTGTGAAGAAATATGTATACTTCCAGGGCACNGGTGATATG |
| | AATGCGCCCCCTGGGTCCCGAGAATCTCAGA[C/T]GAGAAAGAAAGGTGGGTAACCTCCTTCCTGATTCTCTAGAAGAATTCACA |
| | TTTGCTTATTGNTTAGCTCTTCTTATTTCTTATCTCTGTTTTGACTGCTATAAATTCAAGATACACTTTTTTTATTTGTGTTTCA |
| | GTAGAGATTATTGGATTTATTTATAGAGTACTGAAAAACAGGATATTAGGTTGTTTCAATTTGGG |
| rs523386 | GCTGAGGCCAAAACAGGCAATTTCCCTTACTCATGTCCTTGGCGTGAAGNGCCTCGTCCTTGTTCAGTCTTGCACCGAGAGGAGA |
| | GCTCTCTGAGCTCGTGGCCAGCAGGTTTCCTGCTGGAAGCCTTACCTGGATGCTGGGCAAAGCTGTCAGAATAAAGTTCAAGGTG |
| | GTCAGGGCTCTGCAGGGTCCCTCAAGGGAG[C/T]TTCCCTCATCTAAAAACATGATTCAACACAGTGAGCGATTTTCAGTTGTGG |
| | GGTTCCTAGCAGTGTCTAACAAGCCATTCTGGAGTCCATCAACATTTTTTTTTTTTTTAATAAAAAAGGTGAGATGGAATTAAGG |
| | CTGGAAGTGGCGGACTTTGGGAGAAACATNCCAGGAGTCTGGCCTCCTGNGATGAGCAGAGCTC |
| rs7704939 | GAGGATGCAGAAGGAACATCTGGGCTCAGCTATTTCATGCTGTCGGCCATACACTTCCAAGTGGGAGGTGATGGCAGTTTGGTCA |
| | GCTGTTTGCCAACCCAGGAGTTGGGTAAAGGTTGGTAAGAGATGTTATTAGTTTTAGCACCATTTCCTTCCAATAGTCTCATTTT |
| | AATACAATACAGGTTAGTAGTGACCAGAAA[A/C]TATTGCTACTGAATTGAAGGATGACTATACAAGGACTTATATCAGATTATT |
| | TGTTGCTTTTAGTTTCTAGTGTCCCATAAAGTATAGAAATGGAAATTGCTGACAAGAGAGTACCTTTGGTAGGCACAGTTCCTTT |
| | TCTCCCCCCACTGGAGAGGACGCTACAACCTTGCTATAGAGTGTCCTGTGACTGCCCAGTGATG |
| rs1958438 | TATCACTCCAGATGTTCTGGACAGAACAAAGATAGGCTAGAATATGTGATGTAATGAATTAATGAATTTTTTTATACTTCATCAG |
| | CCAACATCAAGATAAACTGTATTGAACTAGCATGTGTCCAGCTGAAGAGTGTTTAAACTGTTAGTGCAAAGCTGAAACTTCAATA |
| | AACGCTAGGAAAGGATCCAGGTTTTATTAC[C/T]GGTGATACAGTTTGAGTGGATAAATTCTAACCATTTTAGCTAAACCCTCCA |
| | GCTTCATATTAATCATGAAGTAGAATAAAGTGGGGAAAAAAAACAACCATGGGGAATGTGAAAATAAGAGTTTAAAACTGAAGTA |
| | TTACAAAGGTCAGCTTCTTTATGAGAAGACAAACATAGCTGCATTTTAATTAAATTATGAGATT |
| rs1958421 | TTATCTTTCAGTAAATTCCTAATGAAATAACAAAGTGTATTGGGTTATCTCCAACTGCCGTACCATACTACTCTCTAAANATAGC |
| | AAGTCAAAAATGACTGACTTTGCCAATATCCTGAGATTCTACAGACATCTCAGTGAAGGCAGAGGATGGTGGGGAGAGTGGCATT |
| | TGGCTCAGCTTCAGAACTGCACTGTCTCC[A/G]TGATAAAGGGATCCTGTTAACTTCTGTTTTCCACCTCCTGACAGTTGACATT |
| | TTAATGTGTGTCAGGAAAATCCATCAACATGCTCCTCTCTCAAACCCAGGATTTCGCNTTGGGATCAGTAGGAATCTGATCAGAG |
| | CTAACACAAGCCCTCCTTCTCATTAAAGCATACCCCATTCCCATTGTTGACTGTCCTAATTT |
| rs9323737 | TATTCCTTCTCATCCAAAATTTGGTTATTTAAAATCTCACTATTTGAACTCATGAATCAACATGTTTGGATATGTTTCCACATAA |
| | AATAACTCACTACTTGCTATTTCAAGTTCAGGGTAAATTTTTTAAAAGTGTAAACGATATCCTACACCTCTTTATTCAAATTTAC |
| | TATCTAAACTTGTGCTGTCCAAATTCAGGA[A/G]GTAGGTAGTTGTGGGTAGCAAGGAATACTTAAAGTGGATTGTAGCTCAAGT |
| | CATACAATAGCAGCATTTGTTTTCACGATCCATTAATATCATCTCTAGTTTACAACCATCAGGAGCCTTTTCATAGCAATGAACT |
| | TTCCTGTGATAACTTTGAAAAACAAAATCTAAATTTGTCATGGCCTACAATGCAATATATGAAA |
| rs12142266 | TCTCTCCACCAAAAGGAACCAGGCCTCCTTGGAGAAATGGCTGATTCCAGGATTGGGGCAGGGAAATTACAAGATGAGTCTAGAC |
| | TATCTATCTTTTTATGGCCAAAAATAAGGAGGTGTTCAAGCAAGATGAGGACATGTTAAAAGGACACAAAAGGCAGCTTGAAGGG |
| | AGCTCCCACTGGTCAAATCTGCAACATTCA[C/T]ACATCAAAAAATGCCAGTAGTAATAAAGCATAATCTATTGAACTAAATAAG |
| | AAACCCATGAGTCCACATTGGTATAAATAAATGAATTATTNCATAAAGGGGGAGGAGAGAAACTTCCTTTGTGTATTAGAAAGCC |
| | TACTAATAAATGTAAAAGGAGTTATAGAGTTAGAAAATCACCATTTGGCATCAGTAATAATTAT |
| rs6500497 | AGGGCTCCCGGAGGACAGGACCTTCCAGGGCCTCCCTGCCCCGAACCCATAGGTGCCAGGCTTCTCACTGCTCACGACCTCCGTG |
| | CCGGGCTCATACCTGCCGCGCCAGCCCCTCTTCAGCAGAGCACAAGTCTGGCAGCAGGAGGGCACCAGCCAGGGGCCCCGCGCCC |
| | CCGCCTCTGTACAGCAGGGTCACCGTGGGG[A/T]GACATGAGAACACCGACCCAGGGAATGGGCTCCTGCCACACCTGCCTGGGA |
| | ACCTGGNCTGTGAGTCCTGCTCGCTGCACCCTCTAGCCTGACGTTGAAGTAACCTCGCCAGCGGGGCCCTCTGTGGCACTGGGCA |
| | CTCAGGGAGAGCACGTGGCATTGGAGAAGGTATTCTGAGTCCTACAGAGAGGGACCTGCGGGGC |
| rs6500498 | GGCTTCTCACTGCTCACGACCTCCGTGCCGGGCTCATACCTGCCGCGCCAGCCCCTCTTCAGCAGAGCACAAGTCTGGCAGCAGG |
| | AGGGCACCAGCCAGGGGCCCCGCGCCCCCGCCTCTGTACAGCAGGGTCACCGTGGGGNGACATGAGAACACCGACCCAGGGAATG |
| | GGCTCCTGCCACACCTGCCTGGGAACCTGG[C/G]CTGTGAGTCCTGCTCGCTGCACCCTCTAGCCTGACGTTGAAGTAACCTCGC |
| | CAGCGGGGCCCTCTGTGGCACTGGGCACTCAGGGAGAGCACGTGGCATTGGAGAAGGTATTCTGAGTCCTACAGAGAGGGACCTG |
| | CGGGGCCTGCCCCACAGGCACGTGGGGCTCCTGCTGGGGCTGTCAAGGACCCCCGGGCACTGAG |
| rs1454333 | TACCGATTTGCAACAAAATTTACTTTTCATGTACTTATGATTCTAATCTATCTCAAAAGTAGATAATCAAACTTTTGTAAATAAC |
| | CTTTCAATGATGGACAATGTTATTGCTCCTTTACCTATTACTACCTCTCCCTGTTCTTTTCTTCATCCCAATCAATATGTCTAGA |
| | TAAATACATTTTTTTCTCATTTGAAATTTA[A/G]TTTGGAAAATGCAGCCACATTTTTACTTATCTTTTTCAAATAATTAAAAAC |
| | TTCTACCTCACTCATGTAACATCTTCCTGCATGATCTAATCTGCATCTAATTTTTCTCTGACTAGCAGCACTAGATGTTTTGTGA |
| | TTAGGGAAGTCAGAAGTGATGAGACTTTAATAGAACATAAAATATTTCTTTTCTATATTTCAGT |
| rs9589698 | ATATATATAACTTAGAAAATGTTTGAATGGTATGATTAGAATGGAGTCATAGTGTTTTGCAAAACATGGATTGTTGAAATACAAA |
| | AATCCAGGTTTTGAAGATTATTAAATAATTCATGTAAGATATCAGAGTGGAGCTCCAACAATTTGTTCTACTCTTATTTGGATAT |
| | AATGTCTGTGAGTGATTCCGTAAATGAGGT[C/T]ATAAATATTCATCTATTTTATCACTGGCAATAGCTGAGAATCTCTGAACAG |
| | ACAGTGGACCACAGAATTCAGACCCTCTATGCCTGTGCCTATCCATTGACTTATCCAACTTTATTTCCATGTTAGATACCAGCAG |
| | TTCAGAAACATTTGTATTTCCCAGCTGCGGAAACAGAATTATGCTTCTTTCTATTAGGATTTGA |
| rs2025949 | GACATCTCAATTTCCACCCTCTTCATAAAATAAACAAACACACAAACTTTGAAATACAATAAAGCTATTAGTTAACCACTGGCAA |
| | GTTTGCTACAAAANGGCTTATCAATGATGAATTTGCCTTTTGATTTATTTATCATTGTGAAATACTGTCAACCCTCATTTACAAA |
| | TTAGAATTCCTAAACCAAACTGGTAAAACT[A/G]AGATTCTTAAATTGAACAAAACTATTAAATGCTATACTGTAGCATTAAATA |
| | TTTACAGCATTTTAACTTTTATATTTTTGTATGTAACACTGAAAATTTTTATAATGGCTTTTGTTCTAATTTGCATATTGAATAT |
| | ACAAACGCTGAACAGGAGAGAAATTAAAAGAAGTGATGTCTTTTCCAAGTTAAAATCTCTCTGG |
| rs902923 | AATGAAATGCANATGTAGTAGCCAGAATTTGAGCAGTCGTTTTGATCATGAGGTGGAAGCAATGTGCAGAAGATGATGGGGANAA |
| | AAGGAATTTCAACAGATTTTTGGGAGAGAAAAATCAGATGATACAACTGGTTTAGAAGGGGGAAGAAATTTACAATCCATGGTGC |
| | CTGTAGAGATTGAGGCTAATGGGAAGAGA[A/G]TGTTCTGCCTTGCAGAACTTGTGAAATGCTCAGGAATTTGAGGCAGTACATA |
| | CAGTGGTCAGCTGGATTAATGAGGGCTGGCTGGAGACTGTGGAACAGTCAGACTCTAGAACACCTTCACCCTCCACACTCAGGCA |
| | AGTCACTCCTCCAGGTCCTCCAACCACTGCCCCTANAGATGAGATGAGTATTATTCACTGGAG |
| rs1984151 | GACAACATTCTGATCAGNTTTTCTTTTCTTTTTTATACTCCTTTAATTTTTGCAGTTTTCTTTAGATTGTGCCACCTCCTGGTCT |
| | AGCTGTTTCTTTGTGAATTTNGTAATAGGCTCTCTGTTTGAATTCTATGGTGTTATTCCAAACATTGCTGCCTTCTTTTTGAAGT |
| | ATGTGGCTCACATTTCACACAGATCCTTTA[C/T]GATGATTTCCTTGCATAGTGGGAAGTTTTTGACGTGAAGGTTTACTGGAGT |
| | CCCTTGGCTTTCAAGNTGGCTCAGAGCAGATGGTACTGCTAGAGAGAGCAACAACACAGCTTTGGGCTTGAAAATGTTAGTGTAC |
| | ACAGATGCTTTTTCCCCTCAGGACTGGTATGATTGATGGGACTTTGGAACTAAAAACTGAGAA |
| rs1459841 | TTTCCTTTTATGGATTGTATTTCATGCATGGAGTCTAAGAACTCTTTGCCTAGCCCTAATTCTCAAATTTTCCTTGTGTTTTCCT |
| | AAAAGTTTTGTAATTTTACATTTTACATTTATGTTTACAATCCATTTTTGGTTAATTTTTCTTTGAGGCATGAAGTTTTCTTGCC |
| | TATGTTCATCTTTTTGGATATGGATGTCCA[A/G]TTGCTCCAGGATTTGTCAAAAAGACTGCTATCCTCCCACCATTAAATTGTT |
| | TTTGTACCTGTGCACCATACGAAACAGCACATTCCTATGGGTTTATTTCTGGGTTCTCTATTATGCTTCATTGTTACATGTGTCT |
| | ATCTCTCTGCCCATGCCATTCCAAATAAACCATAGAATNGGTTTGTATATTTAATTAATTAATT |
| rs4917639 | TTATTTCACTTAGCCTAATGTTATGTTCTCAGGGTTCATTCATGTTTTTGCATGTGTCAGATTTTTCTTCCTTTCTAAGGGTGAA |
| | TAATATTCCGTTGTATGTATAAACCAAGTTTGCTTACCCATTTATCTGTTGATGGGCACTTGGATTACTTTCACCTTTTGACTTT |
| | TTGAGTAATGCTATTATGAATATGGGTAA[A/C]AAATATCTCTTTGATGTGCTGCTTTCAATTCTTTTGGGTATAAATAACCCAA |
| | AAGAATAACCCACCACGCCTGGTTAATTTTTTGTATCTTTAGTAGAAACTGAGTTTCACCATGTTGGCCAGGCTGGTCTCAAACT |
| | CCTGACCCTGTGATCCACCCACCTCAGCCTCCCQAAAGTGCTGGAATTATAGGTGTGAGCCACG |
| rs9332172 | ATTTTAGCAAAAAAAAATATGCTGTGTGACTCAGCTAGCTGCAAAGAGCCTGATGAATGGAATTTTTAGGNAAGCATGGAATAAG |
| | GGAGTAGGAAATAAAGTTTGGGCAAGTTGGTCTACAGCCTCTGCTATACAAGCAGTATTTTTTTCTAGTACTGTACTTTCCAGTT |
| | TCTATGTTGGTAACTATATAACTATGTGA[A/G]TAATTTTGAATTCACTGTAATCAAATATGCTGGTAAATAATTTGTCAGATAA |
| | TTGCATCAAATCATTCCTAGGAAAAGCACAACCAACCATCNGAATTTACTATTGAAAGCTTGGAAAACACTGCAGTTGACTTGTT |
| | TGGAGCTGGGACAGAGACGACAAGCACAACCCTGAGATATGCTCTCCTTCTNCTGCTGAAGCA |
| rs9480684 | CCCCAGTTTTACAGACAAAACAACAACAACAACAACAACAAAACCCCGGAAGNTCAAAGGGGTTGGCCAGTTTGGCCACAATCTC |
| | ACAGCTGTAACTGCTGAACCAGAATCTGGCCATAGGCTGACTTCAAACATTTATTTTATTATAATAGTGTTAGGCTAAAAATCAC |
| | AAGCTGAAAGGCCGTGATTGCACTTAGTTC[A/G]GTAGAGTTGATGATTCTCATGTATACACGTGACCTTTCATTGAAAAGATCT |
| | AANATCTCAAAGGAATTAACACAGCCTACAGGATTTCAATGCAACATGTGTTCAATGAAGCTAATAGGGAGTGAACTGATGGTGC |
| | TTGGGGGAGAATAAATTTAGNGTGGTTGTCCTCAAACTTTATTTGCATCAGAATCACCTGGAGG |
| rs2348427 | CAATCAGCAGAGGACATAGTACTTGGAGTTATTTTCTAATAGTGACAGTGAGCTTGAATTTCCAATATGACTCTATCACCAGGTC |
| | CTCTGACCAAGGACATTTACTTGTAATATTATACTAACTAGGTAAATCACTAGAGCCTGTACCAGTTAGTTAGCTGGGTTCTTAG |
| | GATGGATTTTATATAAAGGATTTGAAGTGA[C/T]ATAATGAAAAAATACAGTTTTGCAAAAGATCCCAAAATGTCCTGTAGGTGG |
| | TAATTATTTCTTAAATGGTTCTTCTATGAAAACTAAGAGCTATAACATTTTGTTTTAAATAAGTGATGCATTCCATCATTTGGGA |
| | GGGAAACAAACATAATATTGTTTTAATACATTACTGTCCAATCATCTATTTTATAAGAGATCAAC |
| rs2774089 | CTTTCCCTGGGTGTGGGNACTGCCGGTGTGGGAACTGGCTGCTGGCGTGGGAACTGGCTGCTGGTGTGGGAACGGCTGCTTGTCC |
| | CAGTGGTGCCCACCTGTGTCCACACTTCAAGGCCACCTGGGCCTGGAGATGTCACTAAGGGTTGACCCGGAGACGCCGACCTCAG |
| | GGACCTGGGAGGCTGCACACTGGCCGTGTT[G/T]GAAGTGACCCTCATGTCACCCAGGTCAAGTGCCACGGGCCCCACACATCCT |
| | CTTCTTCCCTGTCTCCCAGCTGCAGGCCCGGACTGGATGGCTTTGGCTAAGGAACCAACGCAGGTGGAGAAGGAGGCTGACGATG |
| | GGAGCCCAGGCACTCCAGCCTTGAAGGAGGAGAACCTGACCCTGAGCCTGCATGGCAGCCGTGCG |
| rs4907674 | GTGAACTAGTACACTTGTTTTACCAGAAGTCACACAGGATCCTTAAAGCATCCTCATTCTTTCTCNGTACAGGTTCTGGATGGAG |
| | GTCTCATGAGGGATTCGGGCAGAGGCTGATGAAAACATAAAACAGGCCAGTCTCCAGATTCAAGGGAGAGCTGGAGACAGCATTC |
| | ATAGCTTGACCAGGCAGCTTTGACCAGGTG[G/T]GACAAAGGAAGCCCAGATGTCCCAGTCTATTCATGTTTCTATCACAAAATG |
| | GCCTTTGAATTAGTAATTTATAAACAATAGAAATTTATTTCTTATCGTTCTGGAGGCCGGAAAGTCCACGATGAAGACACCAGCT |
| | GGTTCCCAGCCGGTGGGTGAGGACCCAGCCTCTGCTTCCAAGATGGCACCTCTGGGCTGCATCCT |
| rs9877859 | CAACAAGAGATAGATATGCATGTTTGCTGCATGCCAGATATCTTTTATTTAATTCTACAGCTTTTTCCAGAATGGCTGCCAGGTA |
| | GAGCACCTGCATCATTTTGGCAAAGTCCTCTTTGGAGTGGGGTCTTCAAGCCTGATCTTGGAATTGCGTTTTATTATTGTCTGCC |
| | TAGGACTCAGGTCTGCACTGTGGGACACAA[C/T]GCTAAGTGGAAGGCCCCTTATCCATGGCACCATGGAAGCAGGCGCAGGATC |
| | ATGGGAAACTGCAATGGCATTAAAGGAGGAAGCTCCAAGTGGATTTGGAGCCATTCTATAACTCCTTGAAAACAAGACTACCTCG |
| | GGGATATTTAGGATGACTCGTGTGTCACCAAGTGAGAAATACCTAGTGTTGGAACATTTCCAG |
| rs1204798 | CTAACTACAGATTTAAAATCATTAATTATTGTCATACAAAAGTTACCACATTATAAGACTACACTGATTGTCAAATAAAGTGTCT |
| | TCTTCACATTTGAAGCACTCTCTGAAAGATGACCATGACTTGCTATAATGCTGCTTTCTGTGGGACCCATGTAACNCACAAAATT |
| | GTTAACTCTTCAAGCTAACAAAGCCAGCCA[A/G]TTTCAGGCCCCCAAATTTGAAGATAGATTTTCCAAATATTTCCAGCTGTTA |
| | GAAACTATTGAGTTCACTACCAAAGCCAGCTTGGTACNTAGAGTCTNTGTGCTACTCTCTTTTTTTTCCTGATTATGTTTATACT |
| | TTCAAAGAGTTGTCAGGAAGACTAGTACTCACCCACCTTCTATTTCCAGTGGAATGTTCACCTTA |
| rs7719325 | GGGATTCTCAATCCAAGTGCTGACATTCTGGCTAAAAGAGCAGTAAGAGATGGATGATATAGGCACAGTCTTGGCATGTCTGAGC |
| | CCTGTGCCAGAAGGTTATCAGCCCTTTTGGGGGAGATAATATCTGCAGCTTTAATTTTCTCTCTGACTACCAGGCATAATGTAAA |
| | ATTAATGTGCATCATGTCAAGGTTATGGCA[A/G]GGCATTGTTGTCTGGAAGGGAAAACTGTTTGCTCCCCCGCCCTCCAAACAC |
| | TTGCACATACCGTGATAATACATTATTAAAAAGCACATTTCTTTGTCATTGTCAATAGTGGTGAGCCAGTAAAGGATATTTTCCA |
| | GCACTCATTATGCAGGAGGAAGTTAAGAGACTTCTAAAACTCAGTCTTAAAACAAAGAACATAC |
| rs6873640 | TCCCCTCTCCAAAACTATGAAAGCTCAGGTAACAACAGGCAACAGCAAAATCACCCGATGCTTGTTGGAGTCCTGACAACGTTGA |
| | CAAAGTCCTTGGCAGGCCCTTCTATTTTCATGATCAATGGTACTANAGCCAGAAACAAGCCTCGCTGGCTGTGAGCTGATCTCTA |
| | CTGTGAAAATGCACGCACGGTGTACACATT[C/T]GTTTATATTCTAAGCACTGAGGATGAAATAATTCTGCACCGTGTCCATTTT |
| | TGTGCTGTTAAGGCATACGGTTGCTTTGCAAGCAAAACAGTAGATCTTTCATTTGCCAGTGACATTCCACAAAGTGCTTATAATT |
| | CAGTGTTAGCTTATCAGCCGTCCAATCTCCCACTCCAGGGAATGTGTCAACCATCAAAAGGAGC |
| rs2980872 | GGGGGACACGCAAATGTGTCTCTAAGTCAGGGCACCCTCTGTGTGCACAGAGCCATCGAGGGCACTCGCCTGGCTGGACCCCAGG |
| | GAAGGAAATGGGATGGCTTAGTGGAGCAGCCCAGTGTGACTTCCCAGAGCTGACTTCCCAAAACATGCCACGTCCTCATCAAATA |
| | AAATCAAACCCAAACCCCTCTAGGCTGCTG[C/T]GCCNGACCTTGCTTACTCTAACCTCATCTCACCATCATGCTCCAGCCATGC |
| | CTTCTTCTCTATGTAATAGTGCTGGGCACTTTCTGCCACAGGACCTTTGCACACGCAGAGTCCTCTTCCAGGGGCCTCTTCCTCA |
| | CCACCCACCCCTCTGCTTCTCCCCACCAACTCCTACTTCCCCTTCAGGTTTCAGCTACAGTCCC |
| rs554710 | CACAGAGAGAGGACTTCTGTCCTGATAGACGTCGGTGAGGACTGAATCCCCACTTACAGGCGTGCACATCAGGGACTGATGGACA |
| | TCGCTGAGGACCGATCCCAGCTTACAGGCGTGCACACTGGAGGCTCNGAAGAGCTGACTGTGACTCACTTCCGGCTTCCCCCCAG |
| | GACAAAACCTGCCTCTCCTTCCAGACTCGC[C/T]GACTTCCCTTCATGTCCCGCTGTGATGTGCAGTCCAGCATCCTTGGGTCAT |
| | GACACCAGCTGCACTGGCACAGGGAATGAGAGAATATTCCTGAAAATGAAGACTACCGCGGAAGGCAGGAGCTTCTAAGCTAGAG |
| | TGACTGGCAGCTTCAACAGGCCCTGCTGCACCTGAACCAGCCCGGGGCCCCCCAGTGCCNCGGA |
| rs720733 | CAACTTTATAGTCACAAAAATTATCTAGAATTGCATCTATGATGCCCATGTTCCAGGCAGCAGAAAAGAGGGCAATGAAAATGAT |
| | AAATGTCCCCCATTTAAGGACCTTCCCAAGAGTCTCAGGTATCAACATTATGGACATTANATTACTAATTTTAGCTGCAAGGGAA |
| | GCAGGGAACTGGAGTACTTTAGCTGGGCTG[A/G]TCTGAATACAATTGTTTTTCTGCTATTCTGAATATTTATTAAAGTCTTAAC |
| | TCCTTACTAGGTCTATTTCTCTTTTAACAATTGGGTCCACAATTGATTCTTCAGGATGTTTATTGTGTTTGAGGAATAGCTAAAG |
| | AGTCATCATGGTGGTTGAAGAGAAGCAGTCAGTCCATATGCTCATGCTTTTACTAAACTTGAGG |
| rs4388301 | AAGACATGCCTGCTTCCCCTTCACCTCCACCATGATTGTAAATTTCCTGAGGCCTCCCTAGCCATGCTTCCTGTAGAGGCTGTGG |
| | AATTGTGAGCCAATTAAACCTTTTTTCTTTATANATTACCCAGTCTCAGGTATTTCTTTATAGCAGTACAAGAACAGGCTAATAT |
| | ATCCTCTATTTATCTTCTCTCATTTCAAAC[C/T]AAACTTGTTCTCCTTCATCAAAGAAAGAGAGAACCCTGAAATTCAAAGAGA |
| | CACAAAAACATTAGTTTTTGCTGTTGTGCTTTGATAGGCCCAGCTATATTGCTAACGGTAGTTUTTGTAAGCAACTACTGTTACT |
| | TGAAGGGTCATTTTGACTATCTACTATTTTTGCCTTTTTAGTGTATTTAGAACAGGCCATTCTT |
| rs1109089 | TTCTGTTCATTAGACGCACGTCACTAGGTCCATGCAGGGAGATGACACACAGTGTGGCCACTAGGAGAGCAGGAGATCTGGGAGC |
| | CGGCTCCAAGCTGCCTGCCACACAGTCCTAGTTCTTTCAGCTGTTTCTCACGTGACAGGGTACTGTATTTTTGCCCAAGTGGCGA |
| | CACTTTTAAAGATAGGCAAATACAGCATGC[A/G]GAGGAAACCGTGGTTCTGTAATGCAACCGCAGGTCCTTAGGACACCCATAT |
| | CCCATTTGTTGACCCACAGCGAGCTTGTAGGGGGGTTAAATTTCATTTTTGTTTTTTATCAAATGACAGCACACATCGTTTAAAA |
| | TAGCACAGTGTGTAATTCATTCAACAAGCTAACTTATTCTGAAGCTTGTGATGCAATCATGAACA |
| rs2074997 | TTTCCTCAGACATACTCCATAGATATTAATGGCTATATTCTTGTGTATTCTGTTACATCAATCAAAAGGTAAGACTCCTGCTGCC |
| | TGCTTGAGTTGATTTGCTACTCATAGATAACATTGATCCTTTTAAGGGACTGTGCTGGAATTATTAATAGTGACAATTAGAATTA |
| | TTAGGCTACATGTTTTTTAGTGATTTTCTC[G/T]GGAGCAACTGGATTGCTGGGNAACATGGCCCACTAGATGTTCTGTTAGTTA |
| | CACCAATAGGATAAAAGGCTCTTTCTTACCTCAAGCTACCTAGAAAAACAGTGGTTCAGCATGATCTAAGCTTTTCTGCTAATTG |
| | AAATGGGAAATGCCTAAATTAATTTTACTTTGTGTGTGTTTTTACCATATTAAGGTGAAATAG |
| rs965118 | TCCAAGAGCTGCTTTATAAATTGGATGCATACGGGGGCTGGTTCTAGGATTAAGACTGGTAGTAGTAGGGTAAAATGATTAAGGG |
| | GCAAATTCTTTTAAAAGTAATCTATAGTAAATTTGTTCACTGGCTTCCACATTTCAGGAGTGAAATTGCACGCAGTGAATTGCTG |
| | CATAGCGGTATTTGTTAGCAAGTTCTATTT[A/T]CTACTTAGTAGTTTATGTCGGTACATCCATACCACTATGGTTTAATAGTGG |
| | TTTAATTGCCCACCTAGGAATGATGATGAACATGGTTAAATACAGATTATTTTTAGATTGCATGAAATATTTTGGTTTTGCCCAA |
| | TTTTAGGGTGAGAACATATACCCTAAATGAATTTTGGGGTAAGAATGTGAAGTATCAAAAAAAA |
| rs3753151 | TAATTCTACTGTCTCTCATTTTAACCTCATGTCAAAGTGGAAAGCTGGCTTTCTTCTGACATCACTCTCCTTGAGCCCCTTTCTC |
| | CCTGCNTCTTTGAATCACCAGAGAATCCATTTCCAACCTAAACCCCTGAAATTCTCCTAAGTAGACTAATAGCTATTTACTAGTA |
| | AATGCTACTAACCACGGTCATAGAGGTTTC[C/T]AAAATTTGGTGTTCACAAAGCAAGATTTGTGTTACTAAAGTGTGGTGAGGG |
| | CTCTTCATTCATANCCTACTGAGAAGTCCACACCCAGGACGCAGTGCCTTGAGAATGCTGCAACACCTAAGTGCAACCTCCCAAC |
| | TTTCTGGAAGGCGCTTTGTCATTCACTAACAGTGCTACCTTGAGATGGCAGAAGTCGGAAATTG |
| rs2299965 | TACTCTTCCTCCAAACCAAAACCCACCTTAACTTTTAAAAATAAAAATTATTTTAAAAAATTCTTCTGAGCTTTTATCAGGGAAC |
| | AGCATTGTATTATTTTTTCCAATGATAAAATGGCACAGTGAGTTTCTCAGCTGGTATTTTCACTACAGAAGGTGTACTTTCAGGG |
| | GTGTTGACTCAATCTTATACCTCATGATTA[C/T]TGCAAAATAGGCACTGTTTACAGAATTATTTTAAGTTTTCAGATTAATATT |
| | GACTTTGTTATCATGCTTATTCTCCTAAAAAATAACTTATTAGCCCGGTGTGGTGGCTCATGCCTGTAATCCCAGCACTCTGGGA |
| | GGCTGAGGCCGGTGGATTGCTTGACCCCAGGAGTTTGAGACCAGCCTGGACAACGTGATAAAAC |
| rs2299967 | TAAAGTGCTACCCAGAAAGGCCATAAAACTGTTTCCCTGGAGATTTTCAAAACAGGATATTCATCTCTACAGGATGGTTTAAAGA |
| | CAAAGCTGAGGTGGAAGGCAACAATAATAGCCCTGATAAACTGCAGGAAATTAAATGTTTAGCAACAATGAAGAATGAGTTTTCC |
| | TAGAACGGTGGCCAATCTGGAGAGAAGACC[C/T]GGGATACAGGTGAGGGTGGGAAAGAGCTAGAGAAAAGCAAAGACAAAAATT |
| | CTCTATTTCTTAACATATTAAAGAACATGAAATTTAAGAATGATCAAAACTAGTAATAACACAGTATGAGGAAAATGAGATATGA |
| | AATAGAGTATACTCATCCGTCAGCCTGAATGGTTAAAACCATTCATATTTTATAAAGANAATTT |
| rs6948196 | TGACAACCAGCTTTTAATTATGGTCTAATGGTAAACTAGGTTACCAAAGCTCTCTGTACAGGTAAAATCCCAGTGAAAGATGTAC |
| | CAGGCTGAAGACAGTTTACGTAACACTACCATTTTAAGTTGAGTTACTTCCTATCGCGGGACTACTCCGTTGTGGTAGAAATAAC |
| | GGAATGTCAGGGAGCTGGTACTTTTGGCCA[C/T]CACGGCAACAGTTAATACAAAGCACTCCCTGAAAGCCAGACTCCCAGAGTT |
| | ATAGGTGACGTGTCCTTAAAAGCTTTNACATTGTAAATACCAGGAAAAGTACAGGGGACTGGCAGGGAGAATTGTATAGACTACC |
| | TGAGAATTATATTTTACCTATTGGTAGTTCTGACAACACTCAAAAAAAAAGAAAAAAAGAAAAC |
| rs12617566 | ACAACTAAATGTCAGTAAGCCTGGAAAACAACAGAGCTCTAGGGAGTTCAGCTGCAGGAGTTCATGGACTTTTACTCTAATGATC |
| | TTCTATTACCTCAGCTAGCAACTTATTAAGTTTCTGCATATCTTAGTTCAAATTCTCAAAAGGGAATCTGATTAATTCAGATTAG |
| | TTTATGGATTAGTTCCTCTGGGGTTGGATA[A/G]CTTCTCTTGGCTCAATCAGCCATGTCAGGGGAATGACATTGCTAATGAAGG |
| | ATAAACAACAGGAAACAAGATATTTCTCTAGTAGAGATATTTATGATGCTGGTCCATATTTATTTACATGTAAATGTATAATATA |
| | AAACAAACTACATGGATATTAATAAAATGTAATTACCTTATTCTAAGACAGTATATTTATAAGC |
| rs1421780 | CTATATTCTTCCCCTATTCTACCCATCTACCTTCCTTTTCTTACCCCAGCTACTCCAAAGAAAGAAAAATGGCCAGTTTGGTCAG |
| | ATATCAAACCTTTACAGGAANATGGTTNGCCAATGGAGGGATCAGGGCCACCAAGTGTCAGAAAAGCTATTCTGCTTTCTACCTC |
| | CCTCTGTCAAAGTCACCTTGCAAGACTT[A/G]CCTCTTGGGGCTAGGACAGCTGGCATCTCTCCAGTGGGGCACAGGTATATTAG |
| | GGGCTCAGTACCCATTCAGTCCCAGCCAGCCCTCTTCCCTCTGACCCGGCCTAAAGCCCACTTCCCTCCTACTTGCAAGAGTGGC |
| | TTATTAAGGGTCCCAAGATTTGAAAACAGGAAGAATGCAGGAGCCCTTTATACCTCAGTCTT |
| rs301191 | TCTGTGATTGAGGGCTGCAAAACAAAGTATGTTTAAAAATATGTTTATGTTATTTTGATAATTTTGAAAATGTACTCTCACCTGA |
| | GGATGATCTACAAAGCCAGTTCAGCTGGCTCTTCAGCACTGTATTAAAAATACTCTTAGTTCTGGGGAAAAAAAAAAAAACACTT |
| | TCANAAAACAGTTTTTGAAGAGTAACTGTG[A/G]TAGGTTCCGAAGTTGGTNTCTTTCCTGANAGGACTCTAAGTGCCCTANATT |
| | TTATATGTAAAATCATGTAGTTTGCAAGACATTGGAAAGGTGGCACTTCAATTAAACCCTTCACTNCCACCCCCAAAAGTTAAAA |
| | AATAAGTAATATCTAGAGAAAAACTGGTTATGGATCCACTGTGACTGGATAGTATTTGATCACC |
| rs301193 | CTAATTCATGGAGTCTGGGTCGGACNTGGCATTCTCTATTTTTAGCAAGCTTCTCAAGGATACCATGTTGATATTCTTCCCATCT |
| | TTGAATAGCAACCCATTGCTTTAAACATATTTAACATCTCTGGGCTACTATTTTCTATTCAATTGTTGGTCTACTCCACTAGGAT |
| | ATATGTGAGGTCCTTTAATTCAGAATAATA[C/T]CTTATTCAGCTGTGCAATAAGAAATGGCTGAAAAAATGATCATTCCTTCTC |
| | CTTTTTCATTATTACTTTTCTTTGACCAAAGAATGCTATTGCTCTAACAAGAAATGTACCAATTCTGATGAAGTCTGTAGCTTGG |
| | TAAAAATCACAGGGGAGGAATAAGACCACTANCTAACCAATGTATTTGCTAACATACCATAGAA |
| rs13403584 | TTTTCACTAGATTCAATAAAAGCTCACGCAAGTGTAAGTATAAGAGTGTTGGGCTTAATTATGGTTTGGCCTACTATTTCCTTTT |
| | ACTTCATGTTATATCTGAAAGGAATTTACTCATCATGGAGAAAATAAGCTACATTAACACTAAAACACAGTGAGAAACAAATATT |
| | GCTCCAATGCTAGAAAAAAAGAAAATTTCC[A/T]GGGCTCAAAAGAGNTGAGTTTCAAGGACAGTTGACACCTATACCCTACTTA |
| | CTAAGATAGAGTGAATCAGATATAGCTATAATTTGGCCTCTGTAGGTGTATTTCAGCTGTTTCATTTCTTTTCAGGGAAGAAAGA |
| | TGGTGTATGAAACTTTTTCCAAGATGGTCTCTGAAATGAGTTAAACTTCGGTGTTCAAATTGTG |
| rs7676106 | CAGAATTTCTANTGCTATACTTTCTTGAGGTAATTTTAAGAAAGGTTTCCTTANCATTTACCCAAATTTCATACACAGACACACA |
| | CCAAAACTAATAGCTGGGTACAAAAACTGAATGAATATTTTTGTGCTGATACAAACCGTCACAAAGGAAGTAATGATGGGATTTG |
| | TCTACATTAACCTGACATACTGGTGAAAATAAC[C/T]CCATTGTTCATTATTTGAATTAGGCAATAATTTGGAGAAATTCTTGAA |
| | GAGGNCATAAAGGAGACCGCAGATACGTGTGGGCTGCCTGTGAAAGGCATGCTGCTTTGTAAATATTCACACTAAACTTTCAAAC |
| | ACAAGAGTGATACTACCCTAGCAAAACCTAAGGTTCTCCNGGGAGGCAGGTGACTAGTTCCACTTTT |
| rs7685314 | NTTACTCTAGAAAGAAGATAAGAATTGTTTTCATATATTTGAAGAATTTTTACAAGGTAGATATCCCAAACCAGAAATGTTATAT |
| | AAACTAATTCTGGGTAACTTCACACAAAGTTGAAATAACATGGATATAGCACAGTTTAAAGGGTGATCTTTCACATTAGTCAAGA |
| | ATTTTTATCAGACAGATTCATGATTTAT[A/G]GCTTTTATAATAAAAATTATTTATTAAATGGGGTTGTTTATAGTTTGGACTAA |
| | TTGAGTTCATAGATCAAGGGAAAAAGCAGAAAAAGAGGTTTTACACTGTGTTCTTAAAATCTTGAGTTTTTGTGTTCCTAAAGGA |
| | CACATTTTAGTGAAAAAAATGTTTAAAAATTTATCTGGAAATTAGAATGTTTAAGGCCTAAAT |
| rs12143647 | CTCGAAGCAGGGCATGAGGCCCTTTTTGTTCTTGCCTGGTAGCTCTCCACTGTAGAAACTTTCCCTCCATAGCCCTGGATGCTCC |
| | AGCCACACAGTGCTAGCTGCCTTTCCCCAGCTCCCTTGTACTCACGTGCTTCTGCGTTTTTCCTCTGCCTGCCCTCCCCTTCCTG |
| | TGCCCTTTGTTTTCCTGTAAACTGCCTCT[C/T]CACATGAAGCTCCAGCTCAGATACCACCTCCTTCAAGAGACCATCCTTGACC |
| | GGGCGTAGTGGCTCACACCTGTGATCCCAGCACTTTGGGAGGCCAAGGCAGGTGAATCGCTTGAGGCCAGGAGTTCAAGACCAGC |
| | CTGGGCAACATGACAAAACCCCATCTTAAAAAAAAAAAAAGNCCATTTTTTCTCCTAATGTTC |
| rs7550277 | AACTTGTCATTTACAAACACCTGTAAATNCGAACTCTACTTTTTAATATGGCATTACAACTTACAAGATTTGTATGTATGTATGC |
| | AATTAACCATGATACAATGGCAGCATAAAATGGCACCGGTAAAGTGTCAGGCACACAGCCTATTGCAGAGTGAACACTCACATTT |
| | TGTTTCCACGTGCCCCACCTCTTTTCTTGA[C/T]TTAAAGGATTTCTACTGGGCAAATGATAAGAGAAACAAGACACTTTTCTGT |
| | CCTTAAGGAACTTAGACTGGTAAAGAGGATAAAATAAACACAGACAAAGCCAGGCAGGATATACATTTTGAGAGCAGAATGAATC |
| | CAGGTGATATAAGAACACAAAGGAGGAAGACCATGTGCCAAGTTCCCTGAGGACATCAGGATCA |

### FURTHER REFERENCES

[0070] 1. Kessler R C, Berglund P, Demler O, Jin R, Merikangas K R, Walters E E. Lifetime prevalence and age-of-onset distributions of DSM-IV disorders in the National Comorbidity Survey Replication. Arch Gen Psychiatry. June 2005; 62(6):593-602.
[0071] 2. Nierenberg A A, Gray S M, Grandin L D. Mood disorders and suicide. J Clin Psychiatry. 2001; 62 Suppl 25:27-30.
[0072] 3. Teicher M H, Glod C, Cole J O. Emergence of intense suicidal preoccupation during fluoxetine treatment. Am J Psychiatry. February 1990; 147(2):207-210.
[0073] 4. Masand P, Gupta S, Dewan M. Suicidal ideation related to fluoxetine treatment. N Engl J Med. Feb. 7 1991; 324(6):420.
[0074] 5. Wirshing W C, Van Putten T, Rosenberg J, Marder S, Ames D, Hicks-Gray T. Fluoxetine, akathisia, and suicidality: is there a causal connection? Arch Gen Psychiatry. July 1992; 49(7):580-581.
[0075] 6. Licinio J, Wong M L. Depression, antidepressants and suicidality: a critical appraisal. Nat Rev Drug Discov. February 2005; 4(2):165-171.
[0076] 7. Hall W D, Mant A, Mitchell P B, Rendle V A, Hickie I B, McManus P. Association between antidepressant prescribing and suicide in Australia, 1991-2000: trend analysis. Bmj. May 10, 2003; 326(7397):1008.
[0077] 8. Morgan O W, Griffiths C, Majeed A. Association between mortality from suicide in England and antidepressant prescribing: an ecological study. BMC Public Health. Dec. 21 2004; 4:63.
[0078] 9. Nakagawa A, Grunebaum M F, Ellis S P, et al. Association of suicide and antidepressant prescription rates in Japan, 1999-2003. J Clin Psychiatry. June 2007; 68(6):908-916.
[0079] 10. Angst J, Angst F, Gerber-Werder R, Gamma A. Suicide in 406 mood-disorder patients with and without long-term medication: a 40 to 44 years' follow-up. Arch Suicide Res. 2005; 9(3):279-300.
[0080] 11. Perlis R H, Beasley C M, Jr., Wines J D, Jr., et al. Treatment-associated suicidal ideation and adverse effects in an open, multicenter trial of fluoxetine for major depressive episodes. Psychother Psychosom. 2007; 76(1):40-46.
[0081] 12. Jick H, Kaye J A, Jick S S. Antidepressants and the risk of suicidal behaviors. Jama. Jul. 21 2004; 292(3):338-343.
[0082] 13. Hammad T A, Laughren T, Racoosin J. Suicidality in Pediatric Patients Treated With Antidepressant Drugs 10.1001/archpsyc.63.3.332. Arch Gen Psychiatry. Mar. 1, 2006 2006; 63(3):332-339.
[0083] 14. Vitiello B, Swedo S. Antidepressant Medications in Children 10.1056/NEJMp038248. N Engl J Med. Apr. 8, 2004 2004; 350(15):1489-1491.
[0084] 15. Marshall E. ANTIDEPRESSANTS AND CHILDREN: Buried Data Can Be Hazardous to a Company's Health 10.1126/science.304.5677.1576. Science. Jun. 11, 2004 2004; 304(5677):1576-1577.
[0085] 16. Libby A M, Brent D A, Morrato E H, Orton H D, Allen R, Valuck R J. Decline in Treatment of Pediatric Depression After FDA Advisory on Risk of Suicidality With SSRIs 10.1176/appi.ajp.164.6.884. Am J Psychiatry. Jun. 1, 2007 2007; 164(6):884-891.
[0086] 17. Valuck R J, Libby A M, Orton H D, Morrato E H, Allen R, Baldessarini R J. Spillover Effects on Treatment of Adult Depression in Primary Care After FDA Advisory on Risk of Pediatric Suicidality With SSRIs. Am J Psychiatry. Aug. 1, 2007 2007; 164(8):1198-1205.
[0087] 18. Gibbons R D, Brown C H, Hur K, et al. Early evidence on the effects of regulators' suicidality warnings on SSRI prescriptions and suicide in children and adolescents. Am J Psychiatry. September 2007; 164(9):1356-1363.
[0088] 19. Brent D A, Mann J J. Family genetic studies, suicide, and suicidal behavior. Am J Med Genet C Semin Med Genet. Feb. 15 2005; 133(1):13-24.
[0089] 20. Statham D J, Heath A C, Madden P A, et al. Suicidal behaviour: an epidemiological and genetic study. Psychol Med. July 1998; 28(4):839-855.
[0090] 21. Sherry S T, Ward M H, Kholodov M, et al. dbSNP: the NCBI database of genetic variation. Nucleic Acids Res. Jan. 1 2001; 29(1):308-311.
[0091] 22. Sambrook J, Fritsch E F, Maniatis T. Molecular Cloning: A Laboratory Manual. New
[0092] 23. Kim S, Misra A. SNP genotyping: technologies and biomedical applications. Annu Rev Biomed Eng. 2007; 9:289-320.
[0093] 24. Wang L, Luhm R, Lei M. SNP and mutation analysis. Adv Exp Med Biol. 2007; 593:105-116.
[0094] 25. Hill W G, Robertson A. Linkage disequilibrium in finite populations. Theoretical and Applied Genetics. 1968; 38:226-231.
[0095] 26. Hamilton M. A rating scale for depression. J Neurol Neurosurg Psychiatry. February 1960; 23:56-62.
[0096] 27. Hamilton M. Development of a rating scale for primary depressive illness. Br J Soc Clin Psychol. December 1967; 6(4):278-296.
[0097] 28. Trivedi M H, Rush A J, Ibrahim H M, et al. The Inventory of Depressive Symptomatology, Clinician Rating (IDS-C) and Self-Report (IDS-SR), and the Quick Inventory of Depressive Symptomatology, Clinician Rating (QIDS-C) and Self-Report (QIDS-SR) in public sector patients with mood disorders: a psychometric evaluation. Psychol Med. January 2004; 34(1):73-82.
[0098] 29. Rush A J, Trivedi M H, Ibrahim H M, et al. The 16-Item Quick Inventory of Depressive Symptomatology (QIDS), clinician rating (QIDS-C), and self-report (QIDS-SR): a psychometric evaluation in patients with chronic major depression. Biol Psychiatry. Sep. 1 2003; 54(5):573-583.
[0099] 30. Rush A J, Trivedi M H, Carmody T J, et al. Self-reported depressive symptom measures: sensitivity to detecting change in a randomized, controlled trial of chronically depressed, nonpsychotic outpatients. Neuropsychopharmacology. February 2005; 30(2):405-416.
[0100] 31. Rush A J, Bernstein I H, Trivedi M H, et al. An evaluation of the quick inventory of depressive symptomatology and the hamilton rating scale for depression: a sequenced treatment alternatives to relieve depression trial report. Biol Psychiatry. Mar. 15 2006; 59(6):493-501.
[0101] 32. Laje G, Paddock S, Manji H, et al. Genetic Markers of Suicidal Ideation Emerging During Citalopram Treatment of Major Depression. Am J. Psychiatry. Oct. 1, 2007 2007; 164(10)1530-1538.
[0102] 33. Wigginton J E, Cutler D J, Abecasis G R. A note on exact tests of Hardy-Weinberg equilibrium. Am J Hum Genet. May 2005; 76(5):887-893.

The application's sequence listing, which the Patent Office published only in electronic form, follows.

SEQUENCE LISTING (813 sequences)

SEQ ID NO: 1 - DNA, 401 bp, Artificial sequence
  /note="Description of artificial sequence: rs1630535"
  misc_feature (101)..(101): n is a, c, g, or t
  misc_feature (125)..(125): n is a, c, g, or t
  misc_feature (145)..(145): n is a, c, g, or t
tgacactgaaaaacccactcagtcacagggttaagaaactaataaaattactatttttcaagtccttagtacatatttagcatgattctaggcatggcacnggcagaagaaaagtataaaatatngcttctacatataacttacngttttactaaggagatgattgggtaaagacagtccattcaaatgccataatcaacagtgcatagtcaagggccagccaccaagcagctgggagagagaacattgagctaatatttggaataaaccaggtttgccagtcaattatcagaagtacctggttggtaaggagtcctgcagagaagagaagttgttttctgacagccttaagcagttgatcatgcctaaagacaacattatcaatgtccactaggctcttt

SEQ ID NO: 2 - DNA, 401 bp, Artificial sequence
  /note="Description of artificial sequence: rs4724701"
  misc_feature (93)..(93): n is a, c, g, or t
ccctggttccaccgcaggcgaagtcaagatccaaagcaaagtcgaggacacagtgaccgtgtttttaaaaccgccatgaaccagggcggaccncgacacccagatgagagccgtgaggacagcactgagaataatcacttagggctttatttactgacacaagaggactccacggtgtagtgttacatttttaaaaatcaaattacaaaacaatatgagaaccctatctccagttcattctccagggaaagttggcagcattcactgttgggaaaccttcacttaaaaataggttgatgttggccaggcgttgtggctcacgcctgtaatcccagcactttgggaggctgaggtaagcggatcacctgaggtcaggagttagagaccagcctgggcaacat

SEQ ID NO: 3 - DNA, 401 bp, Artificial sequence
  /note="Description of artificial sequence: rs1265235"
  misc_feature (18)..(18): n is a, c, g, or t
actgcatctgcgtagacntgtcatccagtatactcatgcgatgtcactcatctgccccctcctacataaatgatacacaaaaaagtcaacaatcagagaaacccaagctcctggatgtcaacatccacttctgcttggagttggttcctttcatggagacatacacccctcgccacacacctgccacctccctgaccctcacaatccctggcatgagaagctccaccttgtcaagagcagacattctgaaaggctgaagccaggaaccttaaaggaaacattctgccaagtccaccacgtaggatcaatggagatggtggtagtgtggttattggcttacccagctctgggtgtagagtgctttggggaggaggaaggaagaagagctgatcctgccttct

SEQ ID NO: 4 - DNA, 401 bp, Artificial sequence
  /note="Description of artificial sequence: rs2414660"
  misc_feature (60)..(60): n is a, c, g, or t
tagttttattttcaaaacaggaacatccggcagaatctcagctttcattttgaattcagngttcccgcttcatccattattcatacacactgcactttcctggtttgtgattttactaaatttcttcatttgaattatggccttgtggtcaacagcgggcaatatattattcttatataatttttaaatacaaaggcaaatggcacggaacaattagaatcgatggcttgggagtctggcactcagatgtcataggcaaatgctgttttcttgactttaacctatgggttccacttcatgtgggttgtatttttcatacatcaggagtttttataaatttcctattcaatccagcagccctactttgttcgcaaaatataagcaaaacaaatatgtcaggg

SEQ ID NO: 5 - DNA, 401 bp, Artificial sequence
  /note="Description of artificial sequence: rs12589623"
  misc_feature (276)..(276): n is a, c, g, or t
aatcgtagcaacaaaacaaaggcaattccaaattcaaaaaaatcatttttaaattctgcgtctcatcatgcattctgattatgtattagtaaaaatatgaaatcccacctgggcttaatgctaactaaaattttaaatattatcactactttacattttttaaaaagaataaaacattttaaaaagcattatgtaagaaaagcatggagtcagatttgagttgggaactgttattatgctggttctttaggctgttgttttctaagggaactaaanaactcaattttcttatcctctttgggtgagtggtgctgtaagtttgaagactaatgtaaggctctagagtcagaaagtattttattccatacctaatttttccactatgttttgttattcatttt

SEQ ID NO: 6 - DNA, 401 bp, Artificial sequence
  /note="Description of artificial sequence: rs583338"
  misc_feature (161)..(161): n is a, c, g, or t
tactttcctatcatcatctacctttgggatattatgtctttcttagtaaagtgtcgctacaagacttttgtccattttttattgaaatgtctgtcttttaaacattgatttttctttaaatattttggatacaattcctatgtcaggattatacattgcanatatactctctaacttctaccctgtgccttgccttttttgttctcaagtcatctgtaatttgcattcttccgtcttttttcccgtcaatgttatcaggaattgtatacctggagagtataaaccatatactctctaagcacatttagagctactttctgtagatcttgatatgacatgttatcattatcattcagttcacaatattttcctctaatttctttttttaaattttattatta

SEQ ID NO: 7 - DNA, 401 bp, Artificial sequence
  /note="Description of artificial sequence: rs279542"
  misc_feature (309)..(309): n is a, c, g, or t
  misc_feature (320)..(320): n is a, c, g, or t
gtgtgttgcttgaaaggtgtggccttagacactaggagatgatgggtagaagctccttgagaaacctagcagtggccatagagaagtagactgggtatggggaacctaagtcatagttgtaacctacagctgattggtaagaactatgggccagacatttaatctctccatctatgaaatagtccattctcatttatctagcttaggttatgggctcttcttttagttggatattcacatttatctttcagtgttaactgggtatcagttatgagtctactactgtataatggcatccaaaagaatttnaaagtacctcngtttatagggatttacaattcagtagaaacttgttattcatgtgaaacagtgaacataatatctaatgatgtggagcaagt

SEQ ID NO: 8 - DNA, 401 bp, Artificial sequence
  /note="Description of artificial sequence: rs279553"
  misc_feature (53)..(53): n is a, c, g, or t
  misc_feature (378)..(378): n is a, c, g, or t
tagctaatgttgttgcggggaaaggagagaaggcccaagagagagggcaaaangctcagcaaatacgggtattcccactgatagggcatggccacctgatcatgtgacaagagcctcaggtgtcccacgctcatcttagcaaccagcagcagccatatgaccagatgtacgtagatcagcttcttgatttcatacttgagggtcacactgtggggcagagcagagggagaagtatctttcaaatttttcttaccaccaactatatgccagacaactgtactggacactgggatacaaatttgaataaaacagcctagaagccggacacaaagaacagaggaggaaaaagtaattagaaaatgaagtgaaaaagttctngtaaatatatgttcccagatata

SEQ ID NO: 9 - DNA, 401 bp, Artificial sequence
  /note="Description of artificial sequence: rs2774089"
  misc_feature (18)..(18): n is a, c, g, or t
ctttccctgggtgtgggnactgccggtgtgggaactggctgctggcgtgggaactggctgctggtgtgggaacggctgcttgtcccagtggtgcccacctgtgtccacacttcaaggccacctgggcctggagatgtcactaagggttgacccggagacgccgacctcagggacctgggaggctgcacactggccgtgttggaagtgaccctcatgtcacccaggtcaagtgccacgggccccacacatcctcttcttccctgtctcccagctgcaggcccggactggatggctttggctaaggaaccaacgcaggtggagaaggaggctgacgatggagcccaggcactccagccttgaaggaggagaacctgaccctgagcctgcatggcagccgtgcg

SEQ ID NO: 10 - DNA, 401 bp, Artificial sequence
  /note="Description of artificial sequence: rs1421780"
  misc_feature (107)..(107): n is a, c, g, or t
  misc_feature (114)..(114): n is a, c, g, or t
ctatattcttcccctattctacccatctaccttccttttcttaccccagctactccaaagaaagaaaaatggccagtttggtcagatatcaagacctttacaggaanatggttngccaatggagggatcagggccaccaagtgtcagaaaagctattctgctttctacctccctctgtcaaagtcacctgtgcaagacttacctcttggggctaggacagctggcatctctccagtggggcacaggtatattaggggctcagtacccattcagtcccagccagccctcttccctctgacccggcctaaagcccacttccctcctacttgcaagagtggcttattaagggtcccaagatttgaaaacaggaagaatgcaggagccctttatacctcagtctt

SEQ ID NO: 11 - DNA, 401 bp, Artificial sequence
  /note="Description of artificial sequence: rs4907674"
  misc_feature (66)..(66): n is a, c, g, or t
gtgaactagtacacttgttttaccagaagtcacacaggatccttaaagcatcctcattctttctcngtacaggttctggatggaggtctcatgagggattcgggcagaggctgatgaaaacataaaacaggccagtctccagattcaagggagagctggagacagcattcatagcttgaccaggcagctttgaccaggtgggacaaaggaagcccagatgtcccagtctattcatgtttctatcacaaaatgcctttgaattagtaatttataaacaatagaaatttatttcttatcgttctggaggccggaaagtccacgatgaagacaccagctggttcccagccggtgggtgaggacccagcctctgcttccaagatggcacctctgggctgcatcct

SEQ ID NO: 12 - DNA, 401 bp, Artificial sequence
  /note="Description of artificial sequence: rs7676106"
  misc_feature (12)..(12): n is a, c, g, or t
  misc_feature (54)..(54): n is a, c, g, or t
  misc_feature (254)..(254): n is a, c, g, or t
  misc_feature (374)..(374): n is a, c, g, or t
cagaatttctantgctatactttcttgaggtaattttaagaaaggtttccttancatttacccaaatttcatacacagacacacaccaaaacaaaaacaaaacaaaaactgaatgaatatttttgtgctgatacaaaccgtcacaaaggaagtaatgatgggatttgtctacattaacctgacatactggtgaaaataaccccattgttcattatttgaattaggcaataatttggagaaattcttgaagaggncataaaggagaccgcagatacgtgtgggctgcctgtgaaaggcatgctgctttgtaaatattcacactaaactttcaaacacaagagtgatactaccctagcaaaacctaaggttctccngggaggcaggtgactagttccactttt

SEQ ID NO: 13 - DNA, 401 bp, Artificial sequence
  /note="Description of artificial sequence: rs9949324"
  misc_feature (48)..(48): n is a, c, g, or t
  misc_feature (99)..(99): n is a, c, g, or t
  misc_feature (401)..(401): n is a, c, g, or t
gtggagtttctctgttttccgagacggcttactcggcgcctagtgagncggtgcttctgtttttgtctctactccgtgttctgagtgcacccatttatncccagatagcgtttatacttacagaggagacaggcgaacactaaaacacagcagaaatatgacgaaacaccctgcaaccttgtttcttttgagttcctatcactcacttcaatctattctaaaaataaaggacttgtcaggcctaatgataagggagagttttagggaaataaagagagctgaactgacacagacataataatgtcaagatataaatcacagagtccttctgccattttcattatctgcctcggaggattacggtgcttgctataaatgagacgctatggggactctgcccn

SEQ ID NO: 14 - DNA, 401 bp, Artificial sequence
  /note="Description of artificial sequence: rs4518023"
  misc_feature (117)..(117): n is a, c, g, or t
  misc_feature (293)..(293): n is a, c, g, or t
tgtgaggctaaaggctcccacgcagcatggggcatggggagcctgaatgtaagccccagggcaggaagttttgcctatttgctcaccgtgtaatctccagcatctagaatagcatantaggcctttggtaaatatctgttgaatggaaggactaaaattagttctggaagtgtctggggatggggcttaagttacctctgaagggtctccaaggctaaatccttttcctgagttagaaaaacagggctgttctcactgaagttttggccttcagagtgtgatgaggagtgcanaggggcacggggcagcttcaaggacagggctgggaccacagagggtgagaaaagggcacaagggaggaggggtgctcccaagatggcagcccctagagatctgggctg

SEQ ID NO: 15 - DNA, 401 bp, Artificial sequence
  /note="Description of artificial sequence: rs7704939"
gaggatgcagaaggaacatctgggctcagctatttcatgctgtcggccatacacttccaagtgggaggtgatggcagtttggtcagctgtttgccaacccaggagttgggtaaaggttggtaagagatgttattagttttagcaccatttccttccaatagtctcattttaatacaatacaggttagtagtgaccagaaaatattgctactgaattgaaggatgactatacaaggacttatatcagattatttgttgcttttagtttctagtgtcccataaagtatagaaatggaaattgctgacaagagagtacctttggtaggcacagttccttttctccccccactggagaggacgctacaaccttgctatagagtgtcctgtgactgcccagtgatg

SEQ ID NO: 16 - DNA, 401 bp, Artificial sequence
  /note="Description of artificial sequence: rs4544214"
  misc_feature (218)..(218): n is a, c, g, or t
  misc_feature (395)..(395): n is a, c, g, or t
taaaaatgcattaacgtctttttatatccatcaagggaaggatgaaatgttgaatttgaagactaattcagtaagaagtcctaggggtttaactgtacatactacctgaactggcttttctgagagatgaatcaataatgaaacatgtctgttttaaaaactaccacatgtgactcctatttttgttagctgaaagctgctatacggagtattacagnaatgtgaaggtgactagcttgaaggtagggtaactagagagccagaaaagttttgttttaaacttgatttaatgcgtttttattttttcttatacaaaatagagataatgttgctaacttcatggaatatttgaggaaatgatatgaaagtgtctggacgtgcagtaacctcatggnttcttc

SEQ ID NO: 17 - DNA, 401 bp, Artificial sequence
  /note="Description of artificial sequence: rs6072343"
  misc_feature (85)..(85): n is a, c, g, or t
  misc_feature (177)..(177): n is a, c, g, or t
caaccaactggagaggtttttaaactcccagtatccggggcatcagtattcgtctagggcacagtgattctaacacacagtcaangttgagaaccacttatttaattcatcctgtaaatcctcacaatagaatcctgcaaggtagcttttatcaccacctttgccgatgaaattgangctcaaagaggtaaattgatttcagcatctgtagccccaacctgtgacctctccttccttccttctcgggctcccttcagggatttcctgatgttacagaaaatggtatgtatgacgctgccctcctggccaccttgacatagctctgctcccaacagggctcttctgagatagcagccagacactacctgggatcaggactgatactaaatgacttctgccaa

SEQ ID NO: 18 - DNA, 401 bp, Artificial sequence
  /note="Description of artificial sequence: rs965118"
tccaagagctgctttataaattggatgcatacgggggctggttctaggattaagactggtagtagtagggtaaaatgattaaggggcaaattcttttaaaagtaatctatagtaaatttgttcactggcttccacatttcaggagtgaaattgcacgcagtgaattgctgcatagcggtatttgttagcaagttctatttactacttagtagtttatgtcggtacatccataccactatggtttaatagtggtttaattgcccacctaggaatgatgatgaacatggttaaatacagattatttttagattgcatgaaatattttggttttgcccaattttagggtgagaacatataccctaaatgaattttggggtaagaatgtgaagtatcaaaaaaaa

SEQ ID NO: 19 - DNA, 401 bp, Artificial sequence
  /note="Description of artificial sequence: rs1109089"
ttctgttcattagacgcacgtcactaggtccatgcagggagatgacacacagtgtggccactaggagagcaggagatctgggagccggctccaagctgcctgccacacagtcctagttctttcagctgtttctcacgtgacagggtactgtatttttgcccaagtggcgacacttttaaagataggcaaatacagcatgcggaggaaaccgtggttctgtaatgcaaccgcaggtccttaggacacccatatcccatttgttgacccacagcgagcttgtaggggggttaaatttcatttttgtttttatcaaatgacagcacacatcgtttaaaatagcacagtgtgtaattcattcaacaagctaacttattctgaagcttgtgatgcaatcatgaaca

SEQ ID NO: 20 - DNA, 401 bp, Artificial sequence
  /note="Description of artificial sequence: rs2980872"
  misc_feature (205)..(205): n is a, c, g, or t
gggggacacgcaaatgtgtctctaagtcagggcaccctctgtgtgcacagagccatcgagggcactcgcctggctggaccccagggaaggaaatgggatggcttagtggagcagcccagtgtgacttcccagagctgacttcccaaaacatgccacgtcctcatcaaataaaatcaaacccaaacccctctaggctgctgcgccngaccttgcttactctaacctcatctcaccatcatgctccagccatgccttcttctctatgtaatagtgctgggcactttctgccacaggacctttgcacacgcagagtcctcttccaggggcctcttcctcaccacccacccctctgcttctccccaccaactcctacttccccttcaggtttcagctacagtccc

SEQ ID NO: 21 - DNA, 401 bp, Artificial sequence
  /note="Description of artificial sequence: rs2025949"
  misc_feature (99)..(99): n is a, c, g, or t
gacatctcaatttccaccctcttcataaaataaacaaacacacaaactttgaaatacaataaagctattagttaaccactggcaagtttgctacaaaanggcttatcaatgatgaatttgccttttgatttatttatcattgtgaaatactgtcaaccctcatttacaaattagaattcctaaaccaaactggtaaaactgagattcttaaattgaacaaaactattaaatgctatactgtagcattaaatatttacagcattttaacttttatatttttgtatgtaacactgaaaatttttataatggcttttgttctaatttgcatattgaatatacaaacgctgaacaggagagaaattaaaagaagtgatgtcttttccaagttaaaatctctctgg

SEQ ID NO: 22 - DNA, 401 bp, Artificial sequence
  /note="Description of artificial sequence: rs12142266"
  misc_feature (293)..(293): n is a, c, g, or t
tctctccaccaaaaggaaccaggcctccttggagaaatggctgattccaggattggggcagggaaattacaagatgagtctagactatctatctttttatggccaaaaataaggaggtgttcaagcaagatgaggacatgttaaaaggacacaaaaggcagcttgaaggggctcccactggtcaaatctgcaacaattcatacatcaaaaaatgccagtagtaataaagcataatctattgaactaaataagaaacccatgagtccacattggtataaataaatgaattattncataaagggggaggagagaaacttcctttgtgtattagaaagcctactaataaatgtaaaaggagttatagagttagaaaatcaccatttggcatcagtaataattat

SEQ ID NO: 23 - DNA, 401 bp, Artificial sequence
  /note="Description of artificial sequence: rs9877859"
caacaagagatagatatgcatgtttgctgcatgccagatatcttttatttaattctacagctttttccagaatggctgccaggtagagcacctgcatcattttggcaaagtcctctttggagtggggtcttcaagcctgatcttggaattgcgttttattattgtctgcctaggactcaggtctgcactgtgggacacaacgctaagtggaaggccccttatccatggcaccatggaagcaggcgcaggatgcatgggaaactgcaatggcattaaaggaggaagctccaagtggatttggagccattctataactccttgaaaacaagactacctcggggatatttaggatgactcgtgtgtcaccaagtgagaaatacctagtgttggaacatttccag

SEQ ID NO: 24 - DNA, 401 bp, Artificial sequence
  /note="Description of artificial sequence: rs2070439"
tcagctgcttgggaggctgacatgggaggatcccttgagcccaggagtttgaggttagagtgagctgtggtcgtgcctttgcattccagcctgggcaacaacgagagaccctgtttcaaaaccaaaagggagaatggattaccacaggggctcgacatgatcaagtcagtttagtaggaacgacatgtgaggcatggccctgtcacaggcatgaaggttcagaatatagcctggagtacacatgtatccctctgggccaggcagaggcttcacatcttggtgaaaggcctggtcgcactttctctgggtttcagatggactgttaatgcaaagttgtttttgtgtttttgcaaatcccaggagctggtggatggggatggtgtgaccctgttggaacctgc

SEQ ID NO: 25 - DNA, 401 bp, Artificial sequence
  /note="Description of artificial sequence: rs12617566"
acaactaaatgtcagtaagcctggaaaacaacagagctctagggagttcagctgcaggagttcatggacttttactctaatgatcttctattacctcagctagcaacttattaagtttctgcatatcttagttcaaattctcaaaagggaatctgattaattcagattagtttatggattagttcctctggggttggataacttctcttggctcaatcagccatgtcaggggaatgacattgctaatgaaggataaacaacaggaaacaagatatttctctagtagagatatttatgatgctggtccatatttatttacatgtaaatgtataatataaaacaaactacatggatattaataaaatgtaattaccttattctaagacagtatatttataagc

SEQ ID NO: 26 - DNA, 401 bp, Artificial sequence
  /note="Description of artificial sequence: rs1958421"
  misc_feature (80)..(80): n is a, c, g, or t
  misc_feature (312)..(312): n is a, c, g, or t
ttatctttcagtaaattcctaatgaaataacaaagtgtattgggttatctccaactgccgtaccatactactctctaaanatagcaagtcaaaaatgactgactttgccaatatcctgagattctacagacatctcagtgaaggcagaggatggtggggagagtggcatttggctcagcttcagaactggcactgtctccgtgataaagggatcctgttaacttctgttttccacctcctgacagttgacattttaatgtgtgtcaggaaaatccatcaacatgctacctctctcaaacccaggatttcgcnttgggatcagtaggaatctgatcagagctaacacaagccctccttctcattaaagcataccccattcccattgttgactgtcctaattt

SEQ ID NO: 27 - DNA, 401 bp, Artificial sequence
  /note="Description of artificial sequence: rs9589698"
atatatataacttagaaaatgtttgaatggtatgattagaatggagtcatagtgttttgcaaaacatggattgttgaaatacaaaaatccaggttttgaagattattaaataattcatgtaagatatcagagtggagctccaacaatttgttctactcttatttggatataatgtctgtgagtgattccgtaaatgaggtcataaatattcatctattttatcactggcaatagctgagaatctctgaacagacagtggaccacagaattcagaccctctatgcctgtgcctatccattgacttatccaactttatttccatgttagataccagcagttcagaaacatttgtatttcccagctgcggaaacagaattatgcttctttctattaggatttga

SEQ ID NO: 28 - DNA, 401 bp, Artificial sequence
  /note="Description of artificial sequence: rs7645289"
  misc_feature (342)..(342): n is a, c, g, or t
aagtcacttgctttttgtttttttttcagtctccagattgaataggcagactgcccaaatctccctttctttcattttttcactctctctgtcagaagaagggggcattataggacagtattattaggctagatctttgccttgttttagtgtcttatccactggccccttcatagggttgggaaatggtttcataagatggtagaaagggtggcataggtacttgcagtatggctaacagttgttcaccatgtagctttagatatcttagacccagttcccagctgtgtctgccttagtcactctggtcctcgtcttcctcagtatctcctctatgaggtnggcatccatgcaattcactccaattgcttgtacattcttacattaagttttgggggatc

SEQ ID NO: 29 - DNA, 401 bp, Artificial sequence
  /note="Description of artificial sequence: rs2664537"
  misc_feature (206)..(206): n is a, c, g, or t
ctgtgtctatgaatatgactatgaactctgaactattttatccattggaaggtaaaggaaaggtcctacattgtgggaggaagaactgatgagaaccccatcttgcttgctgcttgcttggtggtgggcaggccgagggtagcggcaggctctgggctgtctgcgaggattctggaagctctcccaggtgcccagcagccaggcangggaacggcatgtggcagcagagagtcgggtttggctcttccacgtggcaggcggtttcccagactggccagtccttcacattaatcagatcaaattcagtctgtttctgagaagaaaacacatgcctgtcactctacggcagctgccaccacctgccccccaggcagcctggtccttgctataccagggtggca

SEQ ID NO: 30 - DNA, 401 bp, Artificial sequence
  /note="Description of artificial sequence: rs2228246"
  misc_feature (60)..(60): n is a, c, g, or t
  misc_feature (140)..(140): n is a, c, g, or t
  misc_feature (374)..(374): n is a, c, g, or t
tttgccgagtgtcccttcctgagttccagcagttccttcttgactaccagggggtatggntgggctgacattggcccaggctggtaggttgtggggggctgggctcatccctgactggaggcttctctcatcccctgccntccctaccccatcaggagctgtgggctgttgatcgcctccaggtgcaggagttcatgctcggcttcctccgagaccccttacgagagatcgaggagccatacttcttcctggatgaggtgagcccgatgtttcacccattttttgtcaagagaatgagtaggggtgaccaggaccccacccgggctccaggagctagacgctccttagggatgccaccttgtttctacctactntgcaccttgcccacccccagttgggac

SEQ ID NO: 31 - DNA, 401 bp, Artificial sequence
  /note="Description of artificial sequence: rs2088138"
gtgtcacagacagcccccaccccaagctcccttccaggtatccccataaatcatttgggcacactccctcttggaattgcaatttccatcttccacttatccctaaggagctggccctgtggagaggtgtgttggttgttttgtttttgccaaaggccctcgctctaggtgctcctgtaaaggtaccttggcccctgatatgggatgaatggatgaacgaagccccagatgctccagtgccaaggaggtcagaccgggaacaggcccccactcccacaccctgggatcggagcttgcttggttcttgccatcttgcaggatgacttcgagtctggagggagatacacagtgcctctccatccctggggtggggggaagggattctgctgggactcttgagt

SEQ ID NO: 32 - DNA, 401 bp, Artificial sequence
  /note="Description of artificial sequence: rs2839178"
  misc_feature (328)..(328): n is a, c, g, or t
caccctataaatatcagttgacatacagagtagccaccacgtcccaatctaactcctgacttttccccttatattgtatgtgtgtgtgtgtgtgtgtgtaatcaagtatttctgaaatgcagtataatccaattagtctattttaggtattcattgctataacattttccctcatccttttaccactgaatacagaaactaatagctcatatattttgaatttgttaaaagactcttccccgtgtgtgtggattttgcctgtaggaacacaggactcaccgctgtagatacttgcagaagcactgaagctcctggagggtctcctttncagtctggaagatttcctccacgagaaacaagtccactaagtgggcacagacatcctcacagcaacgggccac

SEQ ID NO: 33 - DNA, 401 bp, Artificial sequence
  /note="Description of artificial sequence: rs6500497"
  misc_feature (259)..(259): n is a, c, g, or t
agggctcccggaggacaggaccttccagggcctccctgccccgaacccataggtgccaggcttctcactgctcacgacctccgtgccgggctcatacctgccgcgccagcccctcttcagcagagcacaagtctggcagcaggagggcaccagccaggggccccgcgcccccgcctctgtacagcagggtcaccgtggggtgacatgagaacaccgacccagggaatgggctcctgccacacctgcctgggaacctggnctgtgagtcctgctcgctgcaccctctagcctgacgttgaagtaacctcgccagcggggccctctgtggcactgggcactcagggagagcacgtggcattggagaaggtattctgagtcctacagagagggacctgcggggc

SEQ ID NO: 34 - DNA, 401 bp, Artificial sequence
  /note="Description of artificial sequence: rs11258903"
  misc_feature (59)..(59): n is a, c, g, or t
  misc_feature (71)..(71): n is a, c, g, or t
  misc_feature (95)..(95): n is a, c, g, or t
  misc_feature (199)..(199): n is a, c, g, or t
aaaattttaaattaaatccaaaaatacataaaattaacaacgttcaaatttattgcttnaccctgatattnatattttttggctgaaatgaaatngcagtttttagcatgaatatgtttctgactcctcttctgtgggttcttttgagattggcatgtctatattgccccgtgctgggttaggagtcaattctcctatngtttttttcctacccaaccttctgcaaaccttgaacaatacagcgagaggcccttagcttacatttggcagaaccacatcatttgttactaagtaaatctctagtctttctttgttggtctgaaagaaatatggcaggcaaaacaatcctgggccagtactcaactatgaagtggtcatcaggtggtccccaatcctcttat

SEQ ID NO: 35 - DNA, 401 bp, Artificial sequence
  /note="Description of artificial sequence: rs2244057"
  misc_feature (73)..(73): n is a, c, g, or t
ttgccccccatagtttctgagagggctcttcctggcccactgctttagttaccactcatattcacatctctcngacttctctcccacgctttttctcaagatatgtgagataaaactcaacattttcctttgtgaacatgcccctctgcctgtatgcctcatcttattcgatgctaacttctctacccagtcaccgaagacaaaaatgcaggcatcataataatctttcttctttaattattcataccctctcctagtctttatcatagtgaattgattaaatagtcatgctcatttcctactaaatattttttggcatctctccatcctctctcctctcactcattagtttacactttttcaccttctgctaaaaccattgcaaggccttcttaactgac

SEQ ID NO: 36 - DNA, 401 bp, Artificial sequence
  /note="Description of artificial sequence: rs1459841"
  misc_feature (376)..(376): n is a, c, g, or t
tttccttttatggattgtatttcatgcatggagtctaagaactctttgcctagccctaattctcaaattttccttgtgttttcctaaaagttttgtaattttacattttacatttatgtttacaatccatttttggttaatttttctttgaggcatgaagttttcttgcctatgttcatctttttggatatggatgtccagttgctccaggatttgtcaaaaagactgctatcctcccaccattaaattgtttttgtacctgtgcaccatacgaaacagcacattcctatgggtttatttctgggttctctattatgcttcattgttacatgtgtctatctctctgcccatgccattccaaataaaccatagaatnggtttgtatatttaattaattaatt

SEQ ID NO: 37 - DNA, 401 bp, Artificial sequence
  /note="Description of artificial sequence: rs7901463"
ttaatttatctctcatttgtgaacactgtaatcatttctctatcccacatttatttagctctcaaagctatgctattttattgtacaatgactaaactactcaacatgagagatttgggaggatctttgtggtcagcttattattcttttcattaccacaacaacagcactacaaactctttttctaagtgtttctccatctatgatctcacttttgtggctagacctcacctctagcccctgggaatttcttctgtgaacgcagcaggatgacatccctcaagtcaaattccaaagccttaaagtagatcagcagatcagggccccctaatgactgattacacacagctctgaccccacacttagccccgagcttgttgttttctgcagccttttatccc

SEQ ID NO: 38 - DNA, 401 bp, Artificial sequence
  /note="Description of artificial sequence: rs584762"
  misc_feature (199)..(199): n is a, c, g, or t
gatgttattgaaaaagattgggaagattatgggtagtaatagagataattgcaaaggagaaacaagaaaaaaaattaatgaatcttccatctcagggagaaataaatggctttattatggggtcaggagggatgatcctaaaattccctgtccaagagaaaatgcatagtggtagtttgggagttggagaatttggcanccacaacatccatgaatcaaaacagcttttaagggacaacctcaggggattgcatttctataaaaggaatgagatgtttttctttatgctgctgaaaatgcagaatcagagccgactagaagcacagctagctcctttgtcattatatgcaaaggacaagaagaaacatgatgttccactataatagggccataggcaaaaa

SEQ ID NO: 39 - DNA, 401 bp, Artificial sequence
  /note="Description of artificial sequence: rs761453"
  misc_feature (79)..(79): n is a, c, g, or t
caagtaagtaaggatgtgtataaagaccctagcccataaatggtcatcactaaataggtagtcattatttatcattggnatctttatttgtgagctgcaatggatatgtaaataaatataggtatgtatgcatgatgcacaggtatccacctgtgtatagcagttgcactatttcccttgcctaaggagaaactgaaatgatagtttaggccaagagatgattcagacccatgtgtatgactaattacagtacttaacaagaaattgtaataatatccattggtatagctagaggtatgagtttctgctaactcaggatctagtgtcaccttcaacaaactccccttattctgaatgtatctagaagctctaaatgctttgctggaaactgaaagggtaga

SEQ ID NO: 40 - DNA, 401 bp, Artificial sequence
  /note="Description of artificial sequence: rs6035712"
  misc_feature (392)..(392): n is a, c, g, or t
tgcccggcctgttcatctgttttcacacaactaaagttgctcagttgttgtgctggaaaggacttccctgcccaaaatataccagcaagaccatcatgcaaccggagcaggctgtgccacagaccctggcatgcagaggtgttgtgtaaacacagaagggatctgggcaaatgcatgccttcatttataacagataaaaataaagaagtgtgccagacagtgaggcactgacgcttcacaggagggttccgagagctttcctccctgcctgaagttccttctcaacccaagtagccaccttgtcctcgtgtttgtagttcccctctcaatccaagcactatccttggcctgggggggtcatcatcaccaccagcaagggtcagcactgcagngtgacaatc

SEQ ID NO: 41 - DNA, 401 bp, Artificial sequence
  /note="Description of artificial sequence: rs554710"
  misc_feature (132)..(132): n is a, c, g, or t
  misc_feature (397)..(397): n is a, c, g, or t
cacagagagaggacttctgtcctgatagacgtcggtgaggactgaatccccacttacaggcgtgcacatcagggactgatggacatcgctgaggaccgatcccagcttacaggcgtgcacactggaggctcngaagagctgactgtgactcacttccggcttccccccaggacaaaacctgcctctccttccagactcgctgacttcccttcatgtcccgctgtgatgtgcagtccagcatccttgggtcatgacaccagctgcactggcacagggaatgagagaatattcctgaaaatgaagactaccgcggaaggcaggagcttctaagctagagtgactggcagcttcaacaggccctgctgcacctgaaccagcccggggccccccagtgccncgga

SEQ ID NO: 42 - DNA, 401 bp, Artificial sequence
  /note="Description of artificial sequence: rs6868846"
  misc_feature (279)..(279): n is a, c, g, or t
aaagaaatatggattggctatcaagggacttccaccactaatcaatattggacaaagatcatctcacttctctgtgtgtctatgtcttcacttttaaagtgagagagacaggctgagtgtttatactagaaaaagctttaatttcaaggaaatctgactagaatcccaacatggaaaaacagatgaaaacgggttcattcattgaagcagagatgggggccggaaggaacgtaaggatgaaatggagggatgggggaaatggagaggtcagtgaaggtntgacaagtagaagcagcagtggcagtgacatagttaaactgggaaacaaacaggatgtggcaactggaaggcaggctgtctgaactagggattttggaagcagaccggtgttgcatcttaag

SEQ ID NO: 43 - DNA, 401 bp, Artificial sequence
  /note="Description of artificial sequence: rs1013120"
  misc_feature (137)..(137): n is a, c, g, or t
  misc_feature (239)..(239): n is a, c, g, or t
caaacttaaaaataacaattttcccagaaggccaaatgtttagggaacattttcccccagaggactcaggggtaaaacgaatctgaagaccttaattattcaatgtccccaagcctctcttcctaaacgtggaatgnggatgagaaggaatcacttacaagagagagaactgtgtgctaaatatcaggagacaagtcgcccaaaattctaggtaatggtagtaaagtaagaataggcancctaaggtatcaaaggtcaaacgtggtcccccaaacacctgacctgcaaacctaggcagatagcagctctagagaagaagaaatggctggagcagagagtacgtggctcagtatattagaccttatttgccacatagatgacttccaaaaatactcttttgg

SEQ ID NO: 44 - DNA, 401 bp, Artificial sequence
  /note="Description of artificial sequence: rs649867"
tgtggggtgtccctgtgtctccggggtgacttgggcctccagagaacccctggcacaacctccagctgaaaacaggaacaaagaaagtgagcttaacattccggctgtttcagacaatgtgtttctctttgtgggggcaaggagggcagggagacacctgaaaccatttttattcatcagctcaagttggtgggtggcagggtcatgttgagggaaaaaagccaaactctgtaaaatatttagagaggtttcttctgagccaaatatgagtggtcaaggcccgaggcacagtctcaagaggtcctgagaacatgcgcccaggttggcttcagacatttagggggacaaaagttacaggcagacgccaatcagtacatgtgaggtgtgcgtggggttggtct

SEQ ID NO: 45 - DNA, 401 bp, Artificial sequence
  /note="Description of artificial sequence: rs6072317"
  misc_feature (186)..(186): n is a, c, g, or t
aaagtaatcttcagttcttcctcacccattacttatatatacaatatattattataaaggagacaacacagaatatagaaggcagatttctaaggtcccctattagaggtttataattcttttataaaatgttatcttttctcttcctcaacacaacaaacgaaccccattaaagtcaaaactganaactctggccaggattctgttatatgtaagatgcctccttgttgatgttgctatagtcctaattaacagtcgacaggacatttcaagacttctcactcttatcaccagtcctggaaaagttgtctttttctataactgaggacatggaatcccatctctagggccacacaggataaaccaaagccaaccttgaccttaaggaaatttgtaaggac

SEQ ID NO: 46 - DNA, 401 bp, Artificial sequence
  /note="Description of artificial sequence: rs4795069"
  misc_feature (318)..(318): n is a, c, g, or t
  misc_feature (338)..(338): n is a, c, g, or t
ctgggagctatttaaaaatgtagaatctcgggccccatcctagaccttctgaatcagaattttagcaatatttccatgtgcttcatatgcacattatatgttacagtttgagaggcattgttctagaaggagctcaaagactcagggatgtgagaatattgaaatggagctactatgtgcaacacgcttcgacactacccacctagccagaatccccgagcaagcccaggggatgcacctatcaccaaggaattaagacatgcattggagaggaaggtactagcagtgctggagtgaggggggaggcaagaagacacncaggatacaacatttaaccnggcacccaccctccggtactgatcctgaatgcatgagcctgaaagtgaatgcctcctttaata

SEQ ID NO: 47 - DNA, 401 bp, Artificial sequence
  /note="Description of artificial sequence: rs6948196"
  misc_feature (279)..(279): n is a, c, g, or t
tgacaaccagcttttaattatggtctaatggtaaactaggttaccaaagctctctgtacaggtaaaatcccagtgaaagatgtaccaggctgaagacagtttacgtaacactaccattttaagttgagttacttcctatcgcgggactactccgttgtggtagaaataacggaatgtcagggagctggtacttttggccatcacggcaacagttaatacaaagcactccctgaaagccagactcccagagttataggtgacgtgtccttaaaagctttnacattgtaaataccaggaaaagtacaggggactggcagggagaattgtatagactacctgagaattatattttacctattggtagttctgacaacactcaaaaaaaaagaaaaaaagaaaac

SEQ ID NO: 48 - DNA, 401 bp, Artificial sequence
  /note="Description of artificial sequence: rs13403584"
  misc_feature (215)..(215): n is a, c, g, or t
ttttcactagattcaataaaagctcacgcaagtgtaagtataagagtgttgggcttaattatggtttggcctactatttccttttacttcatgttatatctgaaaggaatttactcatcatggagaaaataagctacattaacactaaaacacagtgagaaacaaatattgctccaatgctagaaaaaaagaaaatttcctgggctcaaaagagntgagtttcaaggacagttgacacctataccctacttactaagatagagtgaatcagatatagctataatttggcctctgtaggtgtatttcagctgtttcatttcttttcagggaagaaagatggtgtatgaaactttttccaagatggtctctgaaatgagttaaacttcggtgttcaaattgtg

SEQ ID NO: 49 - DNA, 401 bp, Artificial sequence
  /note="Description of artificial sequence: rs7685314"
  misc_feature (1)..(1): n is a, c, g, or t
nttactctagaaagaagataagaattgttttcatatatttgaagaatttttacaaggtagatatcccaaaccagaaatgttatataaactaatagctgggtaacttcacacaaagttgaaataacatggatatagcacagtttaaagggtgatctttcacattagtcaagaatttttatcagacagattcatgaatttatagcttttataataaaaattatttattaaatggggttgtttatagtttggactaattgagttcatagatcaagggaaaaagcagaaaaagaggtttacactgtgttcttaaaatcttgagtttttgtgttcctaaaggacacattttagtgaaaaaaatgtttaaaaatttatctggaaattagaatgtttaaggcctaaat

SEQ ID NO: 50 - DNA, 401 bp, Artificial sequence
  /note="Description of artificial sequence: rs2662090"
  misc_feature (87)..(87): n is a, c, g, or t
cttcaggtggttgaagcttaaatgaggcggacagagatgagctacagagccccaggctgtaatttgcgctaaccagtggatgacctnccaaggcatgagttaggcatttgggattacatcttcaacttcttggagcagtgagacacggtggacagaatatcagcttacccctcagctctgcttttttggggaattcttggccaggagataaaatgagaggacattattgctggaagcatctatagagagcctctaggacagtagttaccaaactgaagtgtgcatttgaaccatctgggaagcttgttaaaaatgcaggttctcagccaggcgcagtggctcatgcctgtaatcccaacactttgggaaccgaggtgtgcagattgcttgagctcgtgagt

SEQ ID NO: 51 - DNA, 401 bp, Artificial sequence
  /note="Description of artificial sequence: rs6500498"
  misc_feature (143)..(143): n is a, c, g, or t
ggcttctcactgctcacgacctccgtgccgggctcatacctgccgcgccagcccctcttcagcagagcacaagtctggcagcaggagggcaccagccaggggccccgcgcccccgcctctgtacagcagggtcaccgtggggngacatgagaacaccgacccagggaatgggctcctgccacacctgcctgggaacctgggctgtgagtcctgctcgctgcaccctctagcctgacgttgaagtaacctcgccagcggggccctctgtggcactgggcactcagggagagcacgtggcattggagaaggtattctgagtcctacagagagggacctgcggggcctgccccacaggcacgtggggctcctgctggggctgtcaaggacccccgggcactgag

SEQ ID NO: 52 - DNA, 401 bp, Artificial sequence
  /note="Description of artificial sequence: rs2074997"
  misc_feature (223)..(223): n is a, c, g, or t
tttcctcagacatactccatagatattaatggctatattcttgtgtattctgttacatcaatcaaaaggtaagactcctgctgcctgcttgagttgatttgctactcatagataacattgatccttttaagggactgtgctggaattattaatagtgacaattagaattattaggctacatgttttttagtgattttctcgtggagcaactggattgctgggnaacatggcccactagatgttctgttagttacaccaataggataaaaggctctttcttacctcaagctacctagaaaaacagtggttcagcatgatctaagcttttctgctaattgaaatgggaaatgcctaaattaattttactttgtgtgtgtttttaccatattaaggtgaaatag

SEQ ID NO: 53 - DNA, 401 bp, Artificial sequence
  /note="Description of artificial sequence: rs1204798"
  misc_feature (161)..(161): n is a, c, g, or t
  misc_feature (290)..(290): n is a, c, g, or t
  misc_feature (299)..(299): n is a, c, g, or t
ctaactacagatttaaaatcattaattattgtcatacaaaagttaccacattataagactacactgattgtcaaataaagtgtcttcttcacatttgaagcactctctgaaagatgaccatgacttgctataatgctgctttctgtgggacccatgtaacncacaaaattgttaactcttcaagctaacaaagccagccaatttcaggcccccaaatttgaagatagattttccaaatatttccagctgttagaaactattgagttcactaccaaagccagcttggtacntagagtctntgtgctactctcttttttttcctgattatgtttatacttcaaagagttgtcaggaagactagtactcacccaccttctatttccagtggaatgttcacctta

SEQ ID NO: 54 - DNA, 401 bp, Artificial sequence
  /note="Description of artificial sequence: rs12143647"
  misc_feature (380)..(380): n is a, c, g, or t
ctcgaagcagggcatgaggccctttttgttcttgcctggtagctctccactgtagaaactttccctccatagccctggatgctccagccacacagtgctagctgcctttccccagctcccttgtactcacgtgcttctgcgtttttcctctgcctgccctccccttcctgtgccctttgttttcctgtcaaactgcctcttcacatgaagctccagctcagataccacctccttcaagagaccatccttgaccgggcgtagtggctcacacctgtgatcccagcactttgggaggccaaggcaggtgaatcgcttgaggccaggagttcaagaccagcctgggcaacatgacaaaaccccatcttaaaaaaaaaaaaagnccattttttctcctaatgttc

SEQ ID NO: 55 - DNA, 401 bp, Artificial sequence
  /note="Description of artificial sequence: rs3801033"
  misc_feature (163)..(163): n is a, c, g, or t
  misc_feature (359)..(359): n is a, c, g, or t
acctgactactgtacttgctatcatgcacattaagtgaaacgatatcaaccgtaacccctataacctgtgctttccctgaacccactgccaaaatatcaacagatcaaatgagaaaaaaatctgagagacaatacttttcaccacctgggatcactatatgcngccaagctaggatgacagtcatctaacaaaaatattctgttgcaggaaaagcaagctatttgttgcacaaggaggttcctaagataagtccaagtagagagttgttctggaggaagtgggtctgcactttacaccttctcatgtcacatcaagctgggagagataggtcatgatctatctcttatccttgccttangctacgatcactgtgtgcctgatcaatgcccagcacatttca

SEQ ID NO: 56 - DNA, 401 bp, Artificial sequence
  /note="Description of artificial sequence: rs10997044"
tgtaccaaaagtaccctgtcttttgccctctcttctgagagaaacattgcatttttctgcaatatctcttcctcgtgtcctctatcctacatttatagagtctcaaatatgctcagcctcaaaattaagatgctttgagcttccagaaaacactacacagataaaggtggctttcaaaagagatgtttcttattgtctacataatcatgcagagttaagcagtcactgcaacctttcatcattttctacaataaggccaactttccagataaccacttagtgaaacaagaatcctgtatttctatggtggagctactgcgggtctcatccaacctcctgccatgtttgggccactgactgtttgggcacttacgtccagcttgcgaggatggagccatggg

SEQ ID NO: 57 - DNA, 401 bp, Artificial sequence
  /note="Description of artificial sequence: rs7350731"
  misc_feature (109)..(109): n is a, c, g, or t
tcagcctttctaacctcacaacttacttccagaccacagcattaatccatgccctttatgctccagtaaaatattttaaagtcccaaaaagtcttctctgacccctgtntcccccaggatttgatatgtatcctttgcacctcttgtgatatttacctgaacatagcacttattgaaattgtttaaagtttttctactcaatgaactgtaaactcattaagagaaggaacgatgtgcttttgactgttgtttcccaagcacctctcaaggcagttggcacattaacgtgatcaaccaatattagttgagtaaatgaaatgagtcccgggggactcacactagcttgagggtcatgggccaattccaaactcactgtctgtagggggataatgagtctgatg

SEQ ID NO: 58 - DNA, 401 bp, Artificial sequence
  /note="Description of artificial sequence: rs9323737"
tattccttctcatccaaaatttggttatttaaaatctcactatttgaactcatgaatcaacatgtttggatatgtttccacataaaataactcactacttgctatttcaagttcagggtaaattttttaaaagtgtaaacgatatcctacacctctttattcaaatttactatctaaacttgtgctgtccaaattcaggaggtaggtagttgtgggtagcaaggaatacttaaagtggattgtagctcaagtcatacaatagcagcatttgttttcacgatccattaatatcatctctagtttacaaccatcaggagccttttcatagcaatgaactttcctgtgataactttgaaaaacaaaatctaaatttgtcatggcctacaatgcaatatatgaaa

SEQ ID NO: 59 - DNA, 401 bp, Artificial sequence
  /note="Description of artificial sequence: rs4881394"
  misc_feature (60)..(60): n is a, c, g, or t
atcagtggcagagactctccctgctctcatgggctctgtctattccctctctacataatnagagtaaaatccaaagagcatgaggaccaaatcaaatatgacaaagactccttagaggcgtgtcagtactggtaacacctgtttttcacaactcacggtgactaaggcacagaccaccccacacagtggcacggattctcctcttgaacagactttccccaggctcctctgagtctcttttgaaataggcctcgccttggtctgtaaggatctgaacacacccaaacataatttctaacagttcaaggctacatcaatagataaccaagccctgttaaagagccagcctgagaaaactcacggcttccaaaagaattcagtatttgttccagcaatgtctg

SEQ ID NO: 60 - DNA, 401 bp, Artificial sequence
  /note="Description of artificial sequence: rs4799159"
tttattcaaaccagaggacaaggaaaactactggatgaacacggttgtcttgggaagagacctgcaggaagctgccccagcagaggtaagcccggtactaacagcttgattctcataaaaaggtggcaataatcgtgaaagtgtgagaaggaatgtggcgttatccatttaatcccagaactgaggctgggagttgtctcacagtgacgtgggccaggcctctccccagcaagggcgattaaagtgaaaccacttaggacatttggtctatttcagatccctgccggtaaccttttccttcttttcaccaactcttttcaaacttaggtttttttttcccttctgtctttgtattttcccgtaacatagccctcggggatgtttacttagatttccctgtt

SEQ ID NO: 61 - DNA, 401 bp, Artificial sequence
  /note="Description of artificial sequence: rs2270101"
  misc_feature (3)..(3): n is a, c, g, or t
  misc_feature (242)..(242): n is a, c, g, or t
acnaaggggcagacactgagacttcagcaagttaggagtttgtcagtaaattggaaccagagttgtttctttctgggctatgcagttgctagattgctctctgctttagccttgctgtctaattgtcatatgtaggaatcatgcaactgcagaactgtgtaccctgtctcttaaagcagctctgtagtggtcattctgagcgaattaatttaggattagctcagaaataactaatgcctccngggtagccagaattgcagtctgcctattaacatttgctttgttccattgctttagagtcatattcaatttatcaatttccctcttccagtttttggcatggtatccttttgtccctttctcctgtatcataactctcagggagcctagcttgctatgtg

SEQ ID NO: 62 - DNA, 401 bp, Artificial sequence
  /note="Description of artificial sequence: rs356999"
  misc_feature (9)..(9): n is a, c, g, or t
  misc_feature (66)..(66): n is a, c, g, or t
aggcctaangcctgactgacaagcagctgtttgaaggacactgtccatccaaacatggattgtacngtggacatactgtcttctctggagttacagagggagttgggttcattgccaccctcattaggtcacagaaatcccaataagataaaatggaagatgctaccctgcctgaaagtgcccagcatggtgcaggatgctgatgggtactcaataaatggactgcaggttgacttagtcccccttcccaagtgggcagtttagattctaagtactttccagttggctgagcagtttttcccaagaagtaggctccttactgttcctgatttcttttgtctatcccatcagaagcaggacaatcaaggcaggtctaagagagaactcatggcaggagcaga

SEQ ID NO: 63 - DNA, 401 bp, Artificial sequence
  /note="Description of artificial sequence: rs618670"
  misc_feature (30)..(30): n is a, c, g, or t
  misc_feature (70)..(70): n is a, c, g, or t
  misc_feature (292)..(292): n is a, c, g, or t
attaaataccagtttatgaatattgcaccnttagggcattatcttttgccagctttcctgctcaccactnccttgtcctttattccgaatgtggacacatgggtaggaggcctgcaaacccgtgatgacatttctcagtgtgtggggccatcttggatcctggcagtggatgagaaaggcgtgaaatggcaaggaacggcaatggtcaactgaacagtgcatggttgtccgtgggttgaggaaacgtgatgtccgtggatgttgtttgctcttttccaaagatgcaaatgcngctgtgaatacggaaccacaatttgacctaaagacatgtctgcactcacatgccaaaatagtttgtcatttgctgtcctttgataattccatgtaaaagactatctcac

SEQ ID NO: 64 - DNA, 401 bp, Artificial sequence
  /note="Description of artificial sequence: rs7788668"
ctttttttttttttttaagagataagatctcgttatattgcccaggctggtctcaaattcctgggctcgagtgaacctcctgagtagttgggactactactcaccacacatggcaataaagattctaaagttagaaggacaaagtgatgttacctaaatttgcctgtgcttctgatatgacaaataatccgccactggtgaatggcccatagagctcatcttcatctttggatgaatacgagtggacctgtcatactcctcagccctatgacatgtaaagcacaaagccaggaatgaggtcattgtcttatcacttacccccaaaagctctcaatggctcaacttacctaagtcttcctcctttattctcttccttcatatcaaaacttctgcaaattttt

SEQ ID NO: 65 - DNA, 401 bp, Artificial sequence
  /note="Description of artificial sequence: rs9332172"
  misc_feature (71)..(71): n is a, c, g, or t
  misc_feature (294)..(294): n is a, c, g, or t
  misc_feature (390)..(390): n is a, c, g, or t
attttagcaaaaaaaaatatgctgtgtgactcagctagctgcaaagagcctgatgaatggaatttttaggnaagcatggaataagggagtaggaaataaagtttgggcaagttggtctacagcctctgctatacaagcagtattttttttctagtactgtactttccagtttctatgttggtaactatataactatgtgagtaattttgaattcactgtaatcaaatatgctggtaaataatttgtcagataattgcatcaaatcattcctaggaaaagcacaaccaaccatcngaatttactattgaaagcttggaaaacactgcagttgacttgtttggagctgggacagagacgacaagcacaaccctgagatatgctctccttctnctgctgaagca

SEQ ID NO: 66 - DNA, 401 bp, Artificial sequence
  /note="Description of artificial sequence: rs902923"
  misc_feature (12)..(12): n is a, c, g, or t
  misc_feature (83)..(83): n is a, c, g, or t
  misc_feature (374)..(374): n is a, c, g, or t
aatgaaatgcanatgtagtagccagaatttgagcagtcgttttgatcatgaggtggaagcaatgtgcagaagatgatgggganaaaaaggaatttcaacagatttttgggagagaaaaatcagatgatacaactggtttagaagggggaagaaatttacaatccatggtgcctgtagagattgaggctaatgggaagagagtgttctgccttgcagaacttgtgaaatgctcaggaatttgaggcagtacatacagtggtcagctggattaatgagggctggctggagactgtggaacagtcagactctagaacaccttcaccctccacactcaggcaagtcactcctccaggtcctccaaccactgcccctanagatgagatgagtattattcactggag

SEQ ID NO: 67 - DNA, 401 bp, Artificial sequence
  /note="Description of artificial sequence: rs4810622"
  misc_feature (305)..(305): n is a, c, g, or t
taaaaacaaatcaagagttgggccagctgcatggaaggacccaagaggattatttaaatggcatgccaaatttcacccatgccacccaatgtcctcaccaaacaggcaacccaacgggagctgttgtcctctggatagccccagatgggtccctaactctagctgctttctcacctgaagatgcagagcacccactgacattcagaggagcttgctctccagaggcccagccatcccccacttctttacaaatgccctcctagctttacttacttattcaacaaacattccagagcatctaccangtgcacagaccaagtaccatagagaaggcaaatcctcataaaacggcctccctgccctcaaggagcttccagtctagattgggagggacaccccca

SEQ ID NO: 68 - DNA, 401 bp, Artificial sequence
  /note="Description of artificial sequence: rs6873640"
  misc_feature (131)..(131): n is a, c, g, or t
tcccctctccaaaactatgaaagctcaggtaacaacaggcaacagcaaaatcacccgatgcttgttggagtcctgacaacgttgacaaagtccttggcaggcccttctattttcatgatcaatggtactanagccagaaacaagcctcgctggctgtgagctgatctctactgtgaaaatgcacgcacggtgtacacattcgtttatattctaagcactgaggatgaaataattctgcaccgtgtccatttttgtgctgttaaggcatacggttgctttgcaagcaaaacagtagatctttcatttgccagtgacattccacaaagtgcttataattcagtgttagcttatcagccgtccaatctcccactccagggaatgtgtcaaccatcaaaaggagc

SEQ ID NO: 69 - DNA, 401 bp, Artificial sequence
  /note="Description of artificial sequence: rs9302822"
  misc_feature (145)..(145): n is a, c, g, or t
  misc_feature (289)..(289): n is a, c, g, or t
  misc_feature (347)..(347): n is a, c, g, or t
aatacctaagtagggtgattggaggtcaaggacccttgtaggaatgaagtggatttgcctggatgtaaaactacatctaagatgttatgagtgaggaagagcccaaaactcagaaatctgtttgaaaaactttgttagaaagcanacatacacatgcaattgttttacatagagggcaatactgcaaaagataatgaaggaactataaacagtgattatctttgttgtagctgtgcagtatgactaagagaggggcagggaagagatgaagcttttgcttttaagattncacctttattctttgtgattttcagcaaagatgccctatttggataattaaaaaatanttaagagaaaagcctccattttgcaaacaacctgtgatcactttacccctgagc

SEQ ID NO: 70 - DNA, 401 bp, Artificial sequence
  /note="Description of artificial sequence: rs3753151"
  misc_feature (91)..(91): n is a, c, g, or t
  misc_feature (266)..(266): n is a, c, g, or t
taattctactgtctctcattttaacctcatgtcaaagtggaaagctggctttcttctgacatcactctccttgagcccctttctccctgcntctttgaatcaccagagaatccatttccaacctaaacccctgaaattctcctaagtagactaatagctatttactagtaaatgctactaaccacggtcatagaggtttccaaaatttggtgttcacaaagcaagatttgtgttactaaagtgtggtgagggctcttcattcatancctactgagaagtccacacccaggacgcagtgccttgagaatgctgcaacacctaagtgcaacctcccaactttctggaaggcgctttgtcattcactaacagtgctaccttgagatggcagaagtcggaaattg

SEQ ID NO: 71 - DNA, 401 bp, Artificial sequence
  /note="Description of artificial sequence: rs10490832"
aaaaatttcggccaaagacagacttcaaataagaggtcattgttaagggttttaaattcaaggagacaaagtggcacggtaacacacatacacaatttaatcggaaaagaaattacctcatagcccagtaaatgtccattgctcaacttccaaggaatggtgttccatgaaacctcaatttctgaggaagataggctattggcagagacttgagatggggccactgtaggctctgttcggaaacagaaattgaaatatgatgataattttggcagttagtttaaaacacagattaatgttcttatttttataaaagcattttaacgtatttgaaaattgtatgaaatattctggcaccatatgttgaaaatagagacactggtccatttccgtttcttagg

SEQ ID NO: 72 - DNA, 401 bp, Artificial sequence
  /note="Description of artificial sequence: rs1545384"
  misc_feature (74)..(74): n is a, c, g, or t
  misc_feature (401)..(401): n is a, c, g, or t
tttagggagcaaaccaaggtggtataagagagtagattgctacaatggaatgtatggaaatataaacaagttanaaaccatacatgactgcagtcaaagatttctgtagccaaataaacaacaagcttcctcctgggcatttatggtttcaaaaataaataagggcagagattacagtctcagagtctatttacttgcacaagggtgacacttctttttatatccactgctcagcaccagctcaactcttttctctggttccaacccctttgcaattatctgcctgagaagaagagggacacatgtgggtatctagtgggagataaatgcagcatgacaagcggattaccatggttgaaacacttttctgaacacactggagcttaaaaagcctaaagctn

SEQ ID NO: 73 - DNA, 401 bp, Artificial sequence
  /note="Description of artificial sequence: rs1884641"
atggattttaaaaggatctcaaatggtatcttctaaaattctaagcattctatcaatcctcatgctgaaatatgacttggtgagtgacacttcaaaaagaaaataaacatgcgtctcaacccattactactttatttcctccagatcatttcctcacaggcagggcagccacgtcagtgaacccactcagatatcttggtgtctaccacttggaagcctcttttctacattccattttgggagagagctggctcttcccggagacttgacaacctggtaccgtctcctcccacaatcaccctcccattcttctggcttatctctggtgtcagagaagaatgtaatctttaggcgtgtacattctgactcccatgttttggggaagacccctcagcgtagct

SEQ ID NO: 74 - DNA, 401 bp, Artificial sequence
  /note="Description of artificial sequence: rs1958438"
tatcactccagatgttctggacagaacaaagataggctagaatatgtgatgtaatgaattaatgaatttttttatacttcatcagccaacatcaagataaactgtattgaactagcatgtgtccagctgaagagtgtttaaactgttagtgcaaagctgaaacttcaataaacgctaggaaaggatccaggttttattactggtgatacagtttgagtggataaattctaaccattttagctaaaccctccagcttcatattaatcatgaagtagaataaagtggggaaaaaaaacaaccatggggaatgtgaaaataagagtttaaaactgaagtattacaaaggtcagcttctttatgagaagacaaacatagctgcattttaattaaattatgagatt

SEQ ID NO: 75 - DNA, 401 bp, Artificial sequence
  /note="Description of artificial sequence: rs4917639"
ttatttcacttagcctaatgttatgttctcagggttcattcatgtttttgcatgtgtcagatttttcttcctttctaagggtgaataatattccgttgtatgtataaaccaagtttgcttacccatttatctgttgatgggcacttggattactttcaccttttgactttttgagtaatgctattatgaatatgggtaaacaaatatctctttgatgtgctgctttcaattcttttgggtataaataacccaaaagaataacccaccacgcctggttaattttttgtatctttagtagaaactgagtttcaccatgttggccaggctggtctcaaactcctgaccctgtgatccacccacctcagcctcccaaagtgctggaattataggtgtgagccacg

SEQ ID NO: 76 - DNA, 401 bp, Artificial sequence
  /note="Description of artificial sequence: rs2279103"
  misc_feature (160)..(160): n is a, c, g, or t
  misc_feature (263)..(263): n is a, c, g, or t
acttttcattattattttttgtaaattatgcattttcacttgtagaaatctctttccttgtggagactcaatggtttgcattattgatgatcgagaagatgtctggaagtttgcccccaatctgataactgtgaagaaatatgtatacttccagggcacnggtgatatgaatgcgccccctgggtcccgagaatctcagatgagaaagaaaggtgggtaacctccttcctgattctctagaagaattcacatttgcttattgnttagctcttcttatttcttatctctgttttgactgctataaattcaagatacactttttttatttgtgtttcagtagagattattggatttatttatagagtactgaaaaacaggatattaggttgtttcaatttggg

SEQ ID NO: 77 - DNA, 401 bp, Artificial sequence
  /note="Description of artificial sequence: rs7307064"
  misc_feature (92)..(92): n is a, c, g, or t
  misc_feature (98)..(98): n is a, c, g, or t
  misc_feature (106)..(106): n is a, c, g, or t
  misc_feature (360)..(360): n is a, c, g, or t
ttgagaagaaaaagagcagttcttttgggggaatttagttttggtcatgctaatttagatacacatttctgataaacaattaggagtataantttaangtttagcngttagctaattagatatgggaataatgttttacactttggcagcagatccacagagacaacataagtcatggtaatacttaagcaagggtgatactcataagggatcaaaccatttaggttgaaaatagggcaagagtcacaaatcaggtaacttcagtggccaccaggtaacaactatgtggcgctatctggttaagaaaagaggggcccttaatagaaaggcgtatacatcccgtttaaggcatttaaatcnatttaaaatatataaataaataaaaacaatgcccataataa

SEQ ID NO: 78 - DNA, 401 bp, Artificial sequence
  /note="Description of artificial sequence: rs6793017"
  misc_feature (30)..(30): n is a, c, g, or t
ataattgtttgagtcacagaggttcctacnactccattaagacagaaggtatagcctagagttggtgggtctgagacagtgtctccaaagtctgaaggataataactgaatatagactccaaaatttaaggcttcagcatcctcagagtccttgcatttgtgagagctatgtctgtgatgttgccgtttgtcaccaggatactttatgttgtcttttaagtgttaggtgtccagatgcagatcacctgcatcttgcctcatatgtctctctgaatgtaaagattttgcctacatctgatgaaaactgtccactgttcacattatttgtcatatgtatctgcttggagcagagtaagacacttctaagggaacttgacatttcatgacccaggatatcagat

SEQ ID NO: 79 - DNA, 401 bp, Artificial sequence
  /note="Description of artificial sequence: rs523386"
  misc_feature (50)..(50): n is a, c, g, or t
  misc_feature (367)..(367): n is a, c, g, or t
  misc_feature (387)..(387): n is a, c, g, or t
gctgaggccaaaacaggcaatttcccttactcatgtccttggcgtgaagngcctcgtccttgttcagtcttgcaccgagaggagagctctctgagctcgtggccagcaggtttcctgctggaagccttacctggatgctgggcaaagctgtcagaataaagttcaaggtggtcagggctctgcagggtccctcaagggagcttccctcatctaaaaacatgattcaacacagtgagcgattttcagttgtggggttcctagcagtgtctaacaagccattctggagtccatcaacattttttttttttttaataaaaaaggtgagatggaattaaggctggaagtggcggactttgggagaaacatnccaggagtctggcctcctgngatgagcagagctc

SEQ ID NO: 80 - DNA, 401 bp, Artificial sequence
  /note="Description of artificial sequence: rs1984151"
  misc_feature (18)..(18): n is a, c, g, or t
  misc_feature (106)..(106): n is a, c, g, or t
  misc_feature (268)..(268): n is a, c, g, or t
gacaacattctgatcagnttttcttttcttttttatactcctttaatttttgcagttttctttagattgtgccacctcctggtctagctgtttctttgtgaatttngtaataggctctctgtttgaattctatggtgttattccaaacattgctgccttctttttgaagtatgtggctcacatttcacacagatcctttatgatgatttccttgcatagtgggaagtttttgacgtgaaggtttactggagtcccttggctttcaagntggctcagagcagatggtactgctagagagagcaacaacacagctttgggcttgaaaatgttagtgtacacacgatgctttttcccctcaggactggtatgattgatgggactttggaactaaaaactgagaa

SEQ ID NO: 81 - DNA, 401 bp, Artificial sequence
  /note="Description of artificial sequence: rs7719325"
gggattctcaatccaagtgctgacattctggctaaaagagcagtaagagatggatgatataggcacagtcttggcatgtctgagccctgtgccagaaggttatcagcccttttgggggagataatatctgcagctttaattttctctctgactaccaggcataatgtaaaattaatgtgcatcatgtcaaggttatggcagggcattgttgtctggaagggaaaactgtttgctcccccgccctccaaacacttgcacataccgtgataatacattattaaaaagcacatttctttgtcattgtcaatagtggtgagccagtaaaggatattttccagcactcattatgcaggaggaagttaagagacttctaaaactcagtcttaaaacaaagaacatac

SEQ ID NO: 82 - DNA, 401 bp, Artificial sequence
  /note="Description of artificial sequence: rs1454333"
taccgatttgcaacaaaatttacttttcatgtacttatgattctaatctatctcaaaagtagataatcaaacttttgtaaataacctttcaatgatggacaatgttattgctcctttacctattactacctctccctgttcttttcttcatcccaatcaatatgtctagataaatacatttttttctcatttgaaatttaatttggaaaatgcagccacatttttacttatctttttcaaataattaaaaacttctacctcactcatgtaacatcttcctgcatgatctaatctgcatctaatttttctctgactagcagcactagatgttttgtgattagggaagtcagaagtgatgagactttaatagaacataaaatatttcttttctatatttcagt

SEQ ID NO: 83 - DNA, 401 bp, Artificial sequence
  /note="Description of artificial sequence: rs7146332"
  misc_feature (40)..(40): n is a, c, g, or t
ttggttctttccctacccagcagccctataccttgccttnatgctatgtatagctggagtttatctcataccatgaatagccaagcatcacatggaatatatcctaagaaatattccataaaaatgaacttgatgggatcatgacagagatggcagatctacaaattttaagaattggagactatctcatagactttgttaagatcacaatcagttctcaacttcaatgtggtacatttacaagcattgcaaacagtgtgagatcccagcacagatgtcaaaccagaaattatgtgacttgaatggcttggaataatggcccatttggggcatccagcacttccactgttgggtaagtactgttgtcaacagtcacactgtccaagtggatgatgcaccct

SEQ ID NO: 84 - DNA, 401 bp, Artificial sequence
  /note="Description of artificial sequence: rs11250017"
  misc_feature (100)..(100): n is a, c, g, or t
  misc_feature (308)..(308): n is a, c, g, or t
tcttataataaatctatctgtctatatctatatctacatctgtcctcctactggttctgtttctctggacaaccctaagactagtatataaaaaatagancaaactttcagattgagaaaaaagacatacaaggcaaatgcataagagataagttttatgatatattgatattcaacatcttaacataattaaatgaagacgggaagtcattgaaagaacaaaggagagttcatgtttactgctacaatgtgcaatgaagatataagttattaatatttttggaaattttaaaacatctctcccatanctatacaaatcaagtggaccaaaaaattgagtaaggatgtggaaaaaccagcattgtcagtaagctagaacacataaatatatattgaagttg

SEQ ID NO: 85 - DNA, 401 bp, Artificial sequence
  /note="Description of artificial sequence: rs17175096"
ttgtaacagaaataaaatgaatgtcattgttacatatttttttggtccttgttagttcagcaaacttctcgtttcctcctcctgctatgctgtgagatgcatatgatgtctatggaagagcgggaataaaatggttaaattacaccaaccccactcacctctgctctttccactgacagtgaacgaaaccatagtaaccccataagaaggcatctgtgaagaaagctttcctgtaaatacacccagtaagttaagaatctgtgttacaaatgcagagacacagaattctctgaaatcactaaaaagaaacctgaccaaaaatgaatgaatgaatgaatgagccaacaacaaacaaagtgaagggagctgacagtcctagtaccttgcagtttgtgacaact

SEQ ID NO: 86 - DNA, 401 bp, Artificial sequence
  /note="Description of artificial sequence: rs2299965"
tactcttcctccaaaccaaaacccaccttaacttttaaaaataaaaattattttaaaaaattcttctgagcttttatcagggaacagcattgtattattttttccaatgataaaatggcacagtgagtttctcagctggtattttcactacagaaggtgtactttcaggggtgttgactcaatcttatacctcatgattactgcaaaataggcactgtttacagaattattttaagttttcagattaatattgactttgttatcatgcttattctcctaaaaaataacttattagcccggtgtggtggctcatgcctgtaatcccagcactctgggaggctgaggccggtggattgcttgaccccaggagtttgagaccagcctggacaacgtgataaaac

SEQ ID NO: 87 - DNA, 401 bp, Artificial sequence
  /note="Description of artificial sequence: rs2299967"
  misc_feature (396)..(396): n is a, c, g, or t
taaagtgctacccagaaaggccataaaactgtttccctggagattttcaaaacaggatattcatctctacaggatggtttaaagacaaagctgaggtggaaggcaacaataatagccctgataaactgcaggaaattaaatgtttagcaacaatgaagaatgagttttcctagaacggtggccaatctggagagaagacctgggatacaggtgagggtgggaaagagctagagaaaagcaaagacaaaaattctctatttcttaacatattaaagaacatgaaatttaagaatgatcaaaactagtaataacacagtatgaggaaaatgagatatgaaatagagtatactcatccgtcagcctgaatggttaaaaccattcatattttataaaganaattt

SEQ ID NO: 88 - DNA, 401 bp, Artificial sequence
  /note="Description of artificial sequence: rs720733"
  misc_feature (145)..(145): n is a, c, g, or t
caactttatagtcacaaaaattatctagaattgcatctatgatgcccatgttccaggcagcagaaaagagggcaatgaaaatgataaatgtcccccatttaaggaccttcccaagagtctcaggtatcaacattatggacattanattactaattttagctgcaagggaagcagggaactggagtactttagctgggctgatctgaatacaattgtttttctgctattctgaatatttattaaagtcttaactccttactaggtctatttctcttttaacaattgggtccacaattgattcttcaggatgtttattgtgtttgaggaatagctaaagagtcatcatggtggttgaagagaagcagtcagtccatatgctcatgcttttactaaacttgagg

SEQ ID NO: 89 - DNA, 401 bp, Artificial sequence
  /note="Description of artificial sequence: rs635546"
  misc_feature (317)..(317): n is a, c, g, or t
tctgcctgcctggggccaccacccacccagtcatacacataggacaagctcaagagccctccaactcacttagtcacttcccccaaatcagatgtgactgaatcctatcgattttgcttcctaaatagcctgggaacagcccctctccactctggctgccattttcctatggaaatgacagtgtttctcacctagattaccttcaccacctcccacatagcctccctgcctccagccttctcccttcttggatatgcaccaaagtgacctttatctaatacccagggttaatcacttcccactcctactgagaacanttcaatggctccttattgccccccagtttctcaaatgccttagatcagtggtcaccaaccattttggcacaagggaccagtttc

SEQ ID NO: 90 - DNA, 401 bp, Artificial sequence
  /note="Description of artificial sequence: rs7550277"
  misc_feature (29)..(29): n is a, c, g, or t
aacttgtcatttacaaacacctgtaaatncgaactctactttttaatatggcattacaacttacaagatttgtatgtatgtatgcaattaaccatgatacaatggcagcataaaatggcaccggtaaagtgtcaggcacacagcctattgcagagtgaacactcacattttgtttccacgtgccccacctcttttcttgacttaaaggatttctactgggcaaatgataagagaaacaagacacttttctgtccttaaggaacttagactggtaaagaggataaaataaacacagacaaagccaggcaggatatacattttgagagcagaatgaatccaggtgatataagaacacaaaggaggaagaccatgtgccaagttccctgaggacatcaggatca

SEQ ID NO: 91 - DNA, 401 bp, Artificial sequence
  /note="Description of artificial sequence: rs301191"
  misc_feature (174)..(174): n is a, c, g, or t
  misc_feature (219)..(219): n is a, c, g, or t
  misc_feature (230)..(230): n is a, c, g, or t
  misc_feature (249)..(249): n is a, c, g, or t
  misc_feature (318)..(318): n is a, c, g, or t
tctgtgattgagggctgcaaaacaaagtatgtttaaaaatatgtttatgttattttgataattttgaaaatgtactctcacctgaggatgatctacaaagccagttcagctggctcttcagcactgtattaaaaatactcttagttctggggaaaaaaaaaaaaacactttcanaaaacagtttttgaagagtaactgtgataggttccgaagttggtntctttcctganaggactctaagtgccctanattttatatgtaaaatcatgtagtttgcaagacattggaaaggtggcacttcaattaaacccttcactnccacccccaaaagttaaaaaataagtaatatctagagaaaaactggttatggatccactgtgactggatagtatttgatcacc

SEQ ID NO: 92 - DNA, 401 bp, Artificial sequence
  /note="Description of artificial sequence: rs301193"
  misc_feature (26)..(26): n is a, c, g, or t
  misc_feature (369)..(369): n is a, c, g, or t
ctaattcatggagtctgggtcggacntggcattctctatttttagcaagcttctcaaggataccatgttgatattcttcccatctttgaatagcaacccattgctttaaacatatttaacatctctgggctactattttctattcaattgttggtctactccactaggatatatgtgaggtcctttaattcagaataataccttattcagctgtgcaataagaaatggctgaaaaaatgatcattccttctcctttttcattattacttttctttgaccaaagaatgctattgctctaacaagaaatgtaccaattctgatgaagtctgtagcttggtaaaaatcacaggggaggaataagaccactanctaaccaatgtatttgctaacataccatagaa

SEQ ID NO: 93 - DNA, 401 bp, Artificial sequence
  /note="Description of artificial sequence: rs12583395"
  misc_feature (180)..(180): n is a, c, g, or t
aaaaaataagatgattggaggacaatcagtagtgtctgtgacatctacaacggagcagttggagaggagtaggcaaatccctatctactggcaagaaagatgtccaagaacatttccaagtgaggacgcaggttgtgaggtcatatgtccattatcacccatctaaggttctgaaaacanacatttatcaaggcatggaggaagttctggaagttacactctttttctctcagagaaagctggaattggggtttggaaagaagaggaaatatgtctatttactcaacatacttctgaattctttaattgttgaaatcctctaagaacttgtattctgcggtcatttttaaatacaagggaaaaacaaacaaacaacccaggctgtaaggaagaaagtgata

SEQ ID NO: 94 - DNA, 401 bp, Artificial sequence
  /note="Description of artificial sequence: rs1037448"
  misc_feature (305)..(305): n is a, c, g, or t
gagccctgggcatgtgagagtttcataaggtactcttgaccaaccttatgtgttgaaaaacagccttgtccaagagtcaggggactcttccagaacattcaattcacctttgccccaaacaggcctaccagggctaaaacaggtagttgaatgtgtctcatcattagctatttgggcaggtggatgttgatacaggttattcttaggcatcagtgccccatggctaatgctgtaggcagtggatgtttttggaagtagccaagcaggattgctgcttgcccttgagtgctccatgccgtctgccnagctcccatcactttaactaggagaaccggcctccaggatccctccctttggttctaacataggcctcagatcagatccagtgtctgtggtttcag

SEQ ID NO: 95 - DNA, 401 bp, Artificial sequence
  /note="Description of artificial sequence: rs4939517"
  misc_feature (79)..(79): n is a, c, g, or t
tgctctccagcctgggggacagagtgagactctgtctcaaaaaaaaaaaaaaaaaagaaaagaaggtccaagggctgcngggaaaaagcttccatgaagctggcaggagaaaatcatgccaccagcctcctagaagatttgtgactcaactacttaactcagagatttgctacccagcctcagaactgcctcctcaattcctccaagggcagaggacgtttcagatcaccagatattcacctaaaacactctccatccctcagtgaaatgtaagagatcttgatcagcaggctcactcatctgacaatatctacttccacaactgttttttttttctttgtaagaggaaaaagtaaatgcagtccgaaaggatctgtagccacaccctagaaaaggtcctg

SEQ ID NO: 96 - DNA, 401 bp, Artificial sequence
  /note="Description of artificial sequence: rs4388301"
  misc_feature (119)..(119): n is a, c, g, or t
aagacatgcctgcttccccttcacctccaccatgattgtaaatttcctgaggcctccctagccatgcttcctgtagaggctgtggaattgtgagccaattaaaccttttttctttatanattacccagtctcaggtatttctttatagcagtacaagaacaggctaatatatcctctatttatcttctctcatttcaaaccaaacttgttctccttcatcaaagaaagagagaaccctgaaattcaaagagacacaaaaacattagtttttgctgttgtgctttgataggcccagctatattgctaacggtagttcttgtaagcaactactgttacttgaagggtcattttgactatctactatttttgcctttttagtgtatttagaacaggccattctt

SEQ ID NO: 97 - DNA, 401 bp, Artificial sequence
  /note="Description of artificial sequence: rs8095186"
  misc_feature (21)..(21): n is a, c, g, or t
  misc_feature (281)..(281): n is a, c, g, or t
  misc_feature (384)..(384): n is a, c, g, or t
acttaatactgggggcaaganggttcttggctgggcacacaatgctatgggaacttaaaaacaaatggactagctgcaggtttaaataatgctacagtccttagacactgtatattattcatagctcgttgaactctattatctcatgtgttcctctcagtggctctgtgaattacccaggacaggaaagaaatgatagagtgtgaagatagaagagtcagtagaggtcagaacccttccccagcccctcagctttttttttttttttttttttttttganatgaagtctggctatgtcactctgaagtgtcgtggtgcgatctgggctcactgcaacctccgccccctgggttacagcgattctcctgcctcagcctcccgantagctgggactacaggt

SEQ ID NO: 98 - DNA, 401 bp, Artificial sequence
  /note="Description of artificial sequence: rs1891877"
acccagagccaagggtaaaaggtctgggcttgttataatttatcacccatctcaaataattggctatcatcaagaattagattcatgcaaggaatcacttaaagattcatttgtctgtcacattaaaaacactaacctatctttttcttcttccttagcagatttttcttcgaggagcacaagggtgggtctggtggaacccttcaggagctagggtgtcggaggtgggggactagccctggtcccactgtccttcctcccctcctcactccccaagctgcccctcaccccctctcttctccttgggagcaatcccccatctccatgcttgtgacacacactgagcttacttctgagcactcagttaataaaggcctgtacattgaaaaatatttttaaaa

SEQ ID NO: 99 - DNA, 401 bp, Artificial sequence
  /note="Description of artificial sequence: rs2348427"
caatcagcagaggacatagtacttggagttattttctaatagtgacagtgagcttgaatttccaatatgactctatcaccaggtcctctgaccaaggacatttacttgtaatattatactaactaggtaaatcactagagcctgtaccagttagttagctgggttcttaggatggattttatataaaggatttgaagtgatataatgaaaaaatacagttttgcaaaagatcccaaaatgtcctgtaggtggtaattatttcttaaatggttcttctatgaaaactaagagcataacattttgttttaaataagtgatgcattccatcatttgggagggaaacaaacataatattgttttaatacattactgtccaatcatctattttataagagatcaac

SEQ ID NO: 100 - DNA, 401 bp, Artificial sequence
  /note="Description of artificial sequence: rs9480684"
  misc_feature (53)..(53): n is a, c, g, or t
  misc_feature (255)..(255): n is a, c, g, or t
  misc_feature (358)..(358): n is a, c, g, or t
ccccagttttacagacaaaacaacaacaacaacaacaacaaaaccccggaagntcaaaggggttggccagtttggccacaatctcacagctgtaactgctgaaccagaatctggccataggctgacttcaaacatttattttattataatagtgttaggctaaaaatcacaagctgaaaggccgtgattgcacttagttcagtagagttgatgattctcatgtatacacgtgacctttcattgaaaagatctaanatctcaaaggaattaacacagcctacaggatttcaatgcaacatgtgttcaatgaagctaatagggagtgaactgatggtgcttgggggagaataaatttagngtggttgtcctcaaactttatttgcatcagaatcacctggagg

SEQ ID NO: 101 - DNA, 401 bp, Artificial sequence
  /note="Description of artificial sequence: rs1265237"
  misc_feature (257)..(257): n is a, c, g, or t
ttaaaaacagctttattgaaatataatttacacactattcaattcccttaaagtatacaattcaataatttttgtataatcacagcattatacaactgtcaccacaatcaatttcagacagtttttggaagcccccaaagaaaccctatgcccttcagtcatcactcttcagtcccccatctcatcccaagcccttggcaaccactcatctactttctgtctctattgatttgttttctgcatgtttcatatgaacngaattatttaatatgtggttccttgtgactagcttctgttttgttttgtttctttgtttttaaccactttattgagatatgattgacatacaaaagcggtagaaatgtagtgtatacaacccgatgtgtttgaagctctgtgta

SEQ ID NO: 102 - DNA, 401 bp, Artificial sequence; identical to SEQ ID NO: 3
  /note="Description of artificial sequence: rs1265235"
  misc_feature (18)..(18): n is a, c, g, or t

SEQ ID NO: 103 - DNA, 401 bp, Artificial sequence
  /note="Description of artificial sequence: rs1265234"
  misc_feature (44)..(44): n is a, c, g, or t
aaccaaaaaacccaaaggcagcagaaggacacttttggagatantggaaaagtttatggcattaatattggtagtgatgatggttacatgggtgtatgcttatctccaaacacatcgagttgtatacattaaatatctatagcttcttgtatgtcaattatatctcaataaagcggtttaaaaaattggataaaatatttcggcaaacacaccaattctcaatagccccatgctgcccaacaccacagaagccaagcagacccagccacactctggatttggtctacaggttatgaggctgacctccaggataaactaagaactgaactgcaactggtgggcaagaaccaagggggagttcaagccctcagagacggtgccagccatgatatcgagatctt

SEQ ID NO: 104 - DNA, 401 bp, Artificial sequence
  /note="Description of artificial sequence: rs10795234"
  misc_feature (77)..(77): n is a, c, g, or t
  misc_feature (225)..(225): n is a, c, g, or t
  misc_feature (271)..(271): n is a, c, g, or t
aatggtcccaactccgaagagtcgggggttgttagccctttcccagaaagcctgacacccgtgtctttagtccagcngccgcactagtcccttttaactggctgacaggtgcccggtatttagcccccaaattctaaggaaaagtaggacagaatagcaagcaaaaggggtctgatggtactcagtgcttggcgataggcaatagtctcgctgctcagtgatagntgatggtctcacccctcggcgatagtctcaccccttggcaataggngatggtcccttcgtggtcgccaaaatgtgtccagaaatggtgggttcttggtctcactgacttcaagaatgaagccgcggaccctcgcagtgagtgttacagttcttaaaggcagcatgtctggagtttt

SEQ ID NO: 105 - DNA, 401 bp, Artificial sequence
  /note="Description of artificial sequence: rs10795241"
  misc_feature (9)..(9): n is a, c, g, or t
  misc_feature (114)..(114): n is a, c, g, or t
  misc_feature (294)..(294): n is a, c, g, or t
  misc_feature (367)..(367): n is a, c, g, or t
  misc_feature (396)..(396): n is a, c, g, or t
caaattaangccaaaatggtgaataatacatctaataaagcaaactctccaaaatcccaaaaatcttttggaaacagtgtttgcaaaattgcacaaagttttcaaactttagtnaatgttaggaacaactcttacaaagacatgtaattctttcacatagtttttaggagtacaaagtaaatcagctaatcatggggacacaaattttcatttcagaatactcttttgagaacttgggatatcctggtgaaagcattttgaggacagtggtttttgacctgggcacactaacantttcactcaactgttcttactctggcggccaccttaaccccatcaaagaggctttctcaagtcaggtctcccngcatgttttgcagcccacaatctttcctnaaact

SEQ ID NO: 106 - DNA, 401 bp, Artificial sequence
  /note="Description of artificial sequence: rs10216189"
  misc_feature (56)..(56): n is a, c, g, or t
  misc_feature (74)..(74): n is a, c, g, or t
  misc_feature (324)..(324): n is a, c, g, or t
  misc_feature (377)..(377): n is a, c, g, or t
atctcaccatgttgcccagcctggtctcaaactcctgggctcaaacaatcctcccnccttggcctcccaaagcnctgcgatgacaggtgtgagccatggcacccagccaggattcgtttctcgccacaagcaaggaatgaagcaggggggcctgctcttccacacaccctgagggggtcacaggctgcatctgtctctgcagccaggaaggagcagcctgctttggatgtccctgggtgatgtgagaaggtgccactctagagtagtgtgtggaggggacacctggggcagagggggagtctctgtggattgggacagaaaggncagcccttcttggcagtcagagggcactcctgtgcggcttcatagtctgctangtacataatgaggctcaaaaagac

SEQ ID NO: 107 - DNA, 401 bp, Artificial sequence; identical to SEQ ID NO: 73
  /note="Description of artificial sequence: rs1884641"

SEQ ID NO: 108 - DNA, 401 bp, Artificial sequence
  /note="Description of artificial sequence: rs17539244"
  misc_feature (45)..(45): n is a, c, g, or t
  misc_feature (158)..(158): n is a, c, g, or t
taaattattaccattctatgattgtgtgacaggttagtaattaanttatgtcaccagttggcttcgcacaactgtgtttattcagctccgtggagcacttttcagggaaaaagaaattatcagccaggcagcctttgtttactgtggaagctggatgntggtggactgcatctcctcctattgactaggaaataagttggctgttaggacatgattttccattcttcaaaatgatatggtgatgcaaggaatttgaaagctacactggaattagaaaagcataaagaaattgccttttatgcactaatcgagccattatgcctgtttcctttggggtatttttttactgtatagacaccacaaacagccatgtgtaaaaaaaaaaggtatgaaaaatctta

SEQ ID NO: 109 - DNA, 401 bp, Artificial sequence
  /note="Description of artificial sequence: rs1019191"
  misc_feature (260)..(260): n is a, c, g, or t
  misc_feature (289)..(289): n is a, c, g, or t
  misc_feature (385)..(385): n is a, c, g, or t
cacttgcaaggatctctgttgaggatttcatgaatctatgaacaagtaaagccagagtggaagacacgtcctaagaggggtgtgaaaaccaagaagaatttccccccagtgtcagcaaagagcctggaggaataatcacccattttagcagtttagaaaagaatatggaaaagcagtgcctggcacccagcacagcgcccagtacaggtcagtggactgggtgaatgttttagaatgagatcagaaacgtcaggagaagnagcccttgtctataagaatgtttggattntaaatcatgctgctataaagacacatgcatgcacacgtatgtttattgtggcactattcacaatagcaaagacttggaaccaacccaaatgtccancaatgatagactggat

SEQ ID NO: 110 - DNA, 401 bp, Artificial sequence
  /note="Description of artificial sequence: rs17442566"
  misc_feature (250)..(250): n is a, c, g, or t
ttctatttgcttatacgtatgcatctttcttatcttttattgtttcagcaccactgataattttgctttttggttcttttttgttccttcagtgaaatggcagcccagaggtaaggtagtcagtagtcatatacctctagtgacaaagaacaacccctggataaagcaccatgtatcttcagggagctgtgcaagcctgcatgatagagctagcaccaacggtgttctgacaagtatgtcgattctgagnttctccacagtccacctgttgggaatctatttgctttggattaaaggcaccagtgcatccagcttcaacttcacattcccctgcccttcaccatcagacagtttatttcagagatcatttgggatctaatgtgtttgcttttctgattctg

SEQ ID NO: 111 - DNA, 401 bp, Artificial sequence
  /note="Description of artificial sequence: rs17442866"
  misc_feature (39)..(39): n is a, c, g, or t
  misc_feature (105)..(105): n is a, c, g, or t
  misc_feature (310)..(310): n is a, c, g, or t
aactgcttttgttcgtggaaggtcacatgtgatgccacngaagccaactcccagtttcccgatgccgttctgctcttgttgttgatgacacgctgagtccctganctggctaagctccctcactaagaaagatgtgattttggtcacagaggagaccaggtgagggacagcaggcacagatgacaacacattattatcatccatttgttcactgactacccaagcaattggagtctgttggattccatgtgatggagaagtcgggaggatgaaagcctgcgtatgcctccagaggctccctaccaaatgntttttaatagtctgtatccctcccacaaacacagttggttactctactgggcaatgaagtttaaaggttggagaggctccaaatctgggca

SEQ ID NO: 112 - DNA, 401 bp, Artificial sequence
  /note="Description of artificial sequence: rs17540392"
  misc_feature (61)..(61): n is a, c, g, or t
  misc_feature (108)..(108): n is a, c, g, or t
  misc_feature (349)..(349): n is a, c, g, or t
ttagaatctaagacataactaatatgctgtctacccactttgggtcatacccaaatggccngttacattgttcccatgtcttcccttgagagcagacatttatgaacntctgtttaaatagaataatttttttctaaagaagcctttttatggatcaaaatccttccattattctctgtgcttacagagtcttaagtctaaataatctctttaatctgcctgccttctcttattccatttctcaaaaccctcccctgctttgacttcaggctaccccatacctccactgtgctgaactaatgttagccataaacatacttgcacctgctgtttcctttacctggaacanctccttcatccgcctgaagtctctcacccaccctaatggcctcttgggtgaa

SEQ ID NO: 113 - DNA, 401 bp, Artificial sequence
  /note="Description of artificial sequence: rs10095339"
accatatcacttgagaacgaaatgaactaaatcagtagtccccagcctttttggcaccggggaccagtctcatgaaagacgattttcccacaagtgggtggtgggaggaagggggatgtttttggaatgattccagcacatcacacttattgtgcactttattattattacattgtaatatataatgaaataagtatacaacttatcatcatgtagaaacagtgggagccctgagcttgttttcctgcaactagatggtcccatctgggggcaatgggagacagtgacagatcatcaggcattggattatcataaggagcatacagcccagatccctcacatgcaccgttcacaatagggttcacactcctatgagaatctaatgccaccactgatctgac

SEQ ID NO: 114 - DNA, 401 bp, Artificial sequence
  /note="Description of artificial sequence: rs10103466"
  misc_feature (261)..(261): n is a, c, g, or t
  misc_feature (304)..(304): n is a, c, g, or t
  misc_feature (384)..(384): n is a, c, g, or t
tgaaatttttcacacgcgcctgtcctgagcctgttcattctgccattccttcccatggaaaccacagtagaggctctgtccacagtttccacccccctctgctccagttcttccgcttctcttgggacctgtgaataacaaactgttaacagcagccatctctaggtctgttggccttattagacctaaataacaatacaacctattaaaacatcatgagatagatatacctaataactgacaaaatcgccattttagctncctgatccatggagtaaagtctcctgtactcccccctctcccnatatagtgaataaaacaataccttctcttggggaatttcaaattttggtggcaccagtggcaaacccaaatgatgcaggngtgggcattgctgcctg

SEQ ID NO: 115 - DNA, 401 bp, Artificial sequence; identical to SEQ ID NO: 84
  /note="Description of artificial sequence: rs11250017"
  misc_feature (100)..(100): n is a, c, g, or t
  misc_feature (308)..(308): n is a, c, g, or t

SEQ ID NO: 116 - DNA, 401 bp, Artificial sequence
  /note="Description of artificial sequence: rs11078172"
ttgctaatgagttttccccagctcatggttagtaatcagtaggtctttgctgactgatgtactaatttacaatctagttagggacatcaggttgacacttgaaaaacatattaactataaaaggaagaaaataaataccatagaagaaacagaatttggctaaaggaatctcagaatggaattcatagtgttcatagaccaaatggaaatttgtacttgaaatgatatttaatgatacctataatatgtaattaaatataaaattatgtaatggaaattatagaagattagatattccaaagggaaggagcttagtgatgcctggaagaatcagaaggctgaatggaggattctttttttaatactgaggatttggataggtaaagattcaaaacaaacaa

SEQ ID NO: 117 - DNA, 401 bp, Artificial sequence
  /note="Description of artificial sequence: rs1013120"
  misc_feature (137)..(137): n is a, c, g, or t
  misc_feature (239)..(239): n is a, c, g, or t
caaacttaaaaataacaattttcccagaaggccaaatgtttagggaacattttcccccagaggactcaggggtaaaacgaatctgaagaccttaattattcaatgtccccaagcctctcttcctaaacgtggaatgnggatgagaaggaatcacttacaagagagagaactgtgtgctaaatatcaggagacaagtcgccaaaaattctaggtaatggtagtaaagtaagaataggcancctaaggtatcaaaggtcaaacgtggtcccccaaacacctgacctgcaaacctaggcagatagcagctctagagaagaagaaatggctggagcagagagtacgtggctcagtatattagaccttatttgccacatagatgacttccaaaaatactcttttgg

SEQ ID NO: 118 - DNA, 401 bp, Artificial sequence
  /note="Description of artificial sequence: rs12952261"
  misc_feature (265)..(265): n is a, c, g, or t
gacatttgggtgacagttgtaaacaatttcgagttggcatgctttgcagatgtcagcctgtatctgtggcatgcattaaacagaccacaaatcctgggcaagaggtacagtatgccatcagcaaatgtatcataagtctttttccccaagaattttcctgatgacagtggaggaaacaaatctagatattccactgaatcaatgttgtcattaacagatttacaatttcatcaatggtataggcactttagtcaaatgaaccacntaggaataagggtattaaatctctgacagcgttagaagttatttatctgttcatctctccaatgaatttatatgtatttttctattgataaaaaaagaaatacctatagtaaaatagacacttttttttggaataa

SEQ ID NO: 119 - DNA, 401 bp, Artificial sequence
  /note="Description of artificial sequence: rs11258902"
caatgtattgcagtgcagagggcttttcccattttccatgaaaatgaagagtgacaagatggaaatccctgctcatccagagaagtgagggcttagattcaaacgaattcaatttaatagaataaagacattgacattcttgcacacccaggtttgcagatatattaaggttcacacttgctccacatggatgctaacttctgtgttgccttctgcatgatttttctgatgaagccaggatacagggatggtctacaccaaatgatgcgtgtactccccttctgtactcacagcagacattattaatcaatatttcattcttttctgactacacatgcacagatggagccacaggaacctccacacagggctccaggcaaccgcagcaaccaatcagaact

SEQ ID NO: 120 - DNA, 401 bp, Artificial sequence
  /note="Description of artificial sequence: rs10159816"
  misc_feature (129)..(129): n is a, c, g, or t
  misc_feature (248)..(248): n is a, c, g, or t
aatcgttctttcctaactactcaggcaccgatggagcagtccctgctgtaattctcactcctggcagatggctccgcctctgccctccagtaacctcctttcctggctgtgtcccaacggccatgacgnggtcgcggcttcctgctgtcacctcgccatcccctgcttggcctcttagctcttccagcgcctgagggacccattccctgtcttaaaccatctgtgtttgaaatacttgactggaaagnatctggcagtgacgcccgataggttaggcagggaggttctgtctttctctagacttcaaggtctagggtatggattttgaaaacccgcatcggctttgagggagcttcagggtgctgaagaccaaggaagggggcaaatggtagaccagatga

SEQ ID NO: 121 - DNA, 401 bp, Artificial sequence
  /note="Description of artificial sequence: rs11258903"
  misc_feature (59)..(59): n is a, c, g, or t
  misc_feature (71)..(71): n is a, c, g, or t
  misc_feature (95)..(95): n is a, c, g, or t
  misc_feature (199)..(199): n is a, c, g, or t
aaaattttaaattaaatccaaaaatacataaaattaacaacgttcaaatttattgcttnaccctgatattnatattttttggctgaaatgaaatngcagtttttagcatgaatatgtttctgactcctcttctgtgggttcttttgagattggcatgtctatattgccccgtgctgggttaggagtcaattctcctatngcttttttcctacccaaccttctgcaaaccttgaacaatacagcgagaggcccttagcttacatttggcagaaccacatcatttgttactaagtaaatctctagtctttctttgttggtctgaaagaaatatggcaggcaaaacaatcctgggccagtactcaactatgaagtggtcatcaggtggtccccaatcctcttat

SEQ ID NO: 122 - DNA, 401 bp, Artificial sequence
  /note="Description of artificial sequence: rs17627102"
  misc_feature (101)..(101): n is a, c, g, or t
accaaacaaggtaagtagaagccaaataaacatacaactaaacagaactctatccttataaaaataaagacagatttttatcatttcaaatgtttaatttnctatcgttttaaataatcactattggtaatttcagtaagacaacatatatcagttcaaacactaaacagtttcatcagggaaaaatcactataaagcttgccaaaaaaaccagatttttaattatacagtagtgtgtataattaaacatgatagttgcataagcattcttttactttttgtacgagattcatttatgctgagtagaaatcagtgaacagtttactgtctgaatgaagttatagtaatatgcccccttccttataattgaaactgtttaaagtacaaaagctattctacag

SEQ ID NO: 123 - DNA, 401 bp, Artificial sequence
  /note="Description of artificial sequence: rs1061626"
  misc_feature (26)..(26): n is a, c, g, or t
  misc_feature (263)..(263): n is a, c, g, or t
  misc_feature (397)..(397): n is a, c, g, or t
aactcgtaatgttgttcggtgacgcncatggtgaccacaccccttgaccaattagagaagggagttatctgtgattggctgaacggaccgacccggaagggtggatgctctcagctggctggcgggaagattttactcccgagtagcggaaagatctgctcgaggcctgggtgctttggtgtcggagatccgagagtcggagatcggagagtcggacacaggacagtcggacaccggacagtcaaacaccggagagttagacngggcttctcggtggggagaggctctgggataactactgttacagctttgaagggtcaagggtgtgcgctttttgtttcatccttccctttcctgctgcagggcgaggccggtctgtagcggatcacttcctttngccc

SEQ ID NO: 124 - DNA, 401 bp, Artificial sequence
  /note="Description of artificial sequence: rs1001027"
  misc_feature (81)..(81): n is a, c, g, or t
gtagtcccacctagtaaggaggctgagaggcaggaggattgcttgagtccaggaatttgaggttggactgcttactagctntgatcatgccactacactccagtctggaagacagagccaggtcttgtctctaaaataaaattaaacaaaaataaaagagtaaaagtgtatttcttgttgtgttctatggcactctgatgcctttattcctaacactatgaatcatgctctgggggactcagcctttgaccttaatcccaatggaaagtctagattcatcccaaaacattagggttcatggtctaccacagggaaagaagagagtgtgtttgtgagggtatcttcccaaaacgtgtttattgctcacttcttcgcattgattgccatttcacacctggaat

SEQ ID NO: 125 - DNA, 401 bp, Artificial sequence
  /note="Description of artificial sequence: rs1001026"
  misc_feature (9)..(9): n is a, c, g, or t
  misc_feature (321)..(321): n is a, c, g, or t
gaggctgangtagaaggatcagttgaggccaggagtttgagaccagtttgggcaacatagtgggatcccatctgttaaaaaaaaaaaaaaaagtttaattgagtgtgttggcacatgcctgtagtcccacctagtaaggaggctgagaggcaggaggattgcttgagtccaggaatttgaggttggactgcttactagctatgatcatgccactacactccagtctggaagacagagccaggtcttgtctctaaaataaaattaaacaaaaataaaagagtaaaagtgtatttcttgttgtgttctatggcactctgatgnctttattcctaacactatgaatcatgctctgggggactcagcctttgaccttaatcccaatggaaagtctagattcatcc

SEQ ID NO: 126 - DNA, 401 bp, Artificial sequence
  /note="Description of artificial sequence: rs13227654"
ggtagaacacttcacccaacaacaacaaaatactcatatttaagtgtgcatgaaaccatctcaggaatagatcatatgtcaggtcacaaaacatgtctcaataaacttaaaaggacatacataatacaaagtatgctctccaaccataggaataaaaatagaaattattaacagaaaggaatgtgggaaattcacaaatacgtagaaataaaacaacatactgctaaataaccaaacggtcaaagaagaaagcacaagtaaattcagacttttagatgaatgaaaatgaaaatacaacatatccaaacttgttggacatggctaaagcagtacttggagggaaatttatagatgtaacttcctatattaaaaaagaagaaatatctcaaatcaataaccta

SEQ ID NO: 127 - DNA, 401 bp, Artificial sequence
  /note="Description of artificial sequence: rs13227316"
  misc_feature (4)..(4): n is a, c, g, or t
  misc_feature (277)..(277): n is a, c, g, or t
  misc_feature (307)..(307): n is a, c, g, or t
cagnagagctgactgaattgtgttctagatttggatggaaagtaaaaattgtgagatataaacttggagatttagtggagaacatttgcaagcaaagtgtggaagatgtgatcttatttctccttgcttcttatagtataaatgcaagaggtgtgagataaattgagaagggaactattatgtgaaaggaaccagcatttactgcctgaaaaaattctcagcctatctagatagcaaaagatgagaaaatatggtctggagagaacaccaaaggcgnggtggacaaaagtttgttgatgagatatgngacttacaaatacaatcaaccatcttatcagaagccacaaatagagatggagttatctagaaacaaatctatgcaagactcccttgtctaatgg

SEQ ID NO: 128 - DNA, 401 bp, Artificial sequenc
  /note="Description of artificial sequence: rs11765548"
  misc_feature (52)..(52): n is a, c, g, or t
tgcataggaagcagacaggtttttgaggattttgtgccagtaggaacactgncagcctgtactaaaaggggtaaagatggggtaaaatgaaagaagtctggctccaaggactgagccatggatgcagtagatggggtcattattgctgcagcccagaagatggagcaccaagtcacagagaattattcttacatcttgaaacttaatggaatcaggaaacctgttggctaacagaggcccctttattccttcaaatttctccctttttgattggaaatatctctcttatgtttgtcccaccattgtattttggaagcagataccttattttctggtttcacaggtccacagatgagaaattttccccaggatgaaccatacccagattctcaccaatacct

SEQ ID NO: 129 - DNA, 401 bp, Artificial sequence
  /note="Description of artificial sequence: rs12700402"
  misc_feature (60)..(60): n is a, c, g, or t
tagatatgatacattttatagtgtctggatgatatattcctggtgggaagatagagtggnggcaggcagactgcattaattcaatcaatcattcagttgacttgaagctaagttacaatttttataaggtataatttactttgattctcctgtttgtatctctacagagttcttaaatgagatcctgggatatgtactaggggctttcccttttgaagggttgtgaaataacatttttatctctcagtgccatgatgcataaaaactaaaaatcttttttctggctttcagcaagtttccgcctcttttttttcttttttttttttttttttttttttttttccctctctgagcaatccaagaattcagcaaatactcaagaggaaaacaaggaaagtgcc

SEQ ID NO: 130 - DNA, 401 bp, Artificial sequence
  /note="Description of artificial sequence: rs11561822"
aagcaatattttggggaaaatcataatggtgaacaggaagcttattattgcacacacaagcatggtgcttagggaaggcaaacttaaagccagatccagagtaaggctctattccatgaggacaaatagttgtctctccatgaaagaaaatatttgatataatcaatctgccactaactatctggtcaccctcagatgttatatcttaggatggtcactgctgctggccagttcggctcctggcagtaataaggacagccttgatgaaaggaggcctgtattgttgaagttcctgtgtagccctatccttccagtatagccgctttgcccataaactgtttgaacaaaggctggaataccaaagagatttactgatatcctcaaagtcatcttgaccatct

SEQ ID NO: 131 - DNA, 401 bp, Artificial sequence
  /note="Description of artificial sequence: rs11764386"
tacttttagaacactttgattttatcttaccttaaaactattacctgtaagacagatggggtgagtgaattttaaatacatctctattaggtaggatttaattagtatcttcttttaccaagctatataaagtgagagtcctaagacctgtgttcaaggctgagttttgccactcagcagctaggtgaccttagccaagtactctaccctattgagagcttcagtttcctcttctgtaaaatggggattctatgcactttataggatgattttgaggataagatgatcattttaattacacatattagctaccactactatcacaataacataatgcaaagaaaataataactacaactggttgtaaaaaatctttctctacaattataaaacagttatct

SEQ ID NO: 132 - DNA, 401 bp, Artificial sequence
  /note="Description of artificial sequence: rs10488277"
  misc_feature (303)..(303): n is a, c, g, or t
agttcttggctctttttcactgtgactgcacagcggtttccttcttcatagtcccttgctgtagtcaccaagagagcatgctagtgttttcctcttgttcctgcttatgcagagctcagatatatgaaaaatttgtatgctttgaaggctgccaaagcatttatactctggacatagttttaactgcaactgctttggctaccagtttaaaccgagttcttcaaaaagcatgaactcgttttcattcattagccctgtttacaatgtggattttgacataaatgaatttgattttcttttagntccagtaacagaatggaataagatctattgccataaattgtagttaagaactgtaaggcaatcgggcagtgaaacttgatattgtattaacttaatag

SEQ ID NO: 133 - DNA, 401 bp, Artificial sequence
  /note="Description of artificial sequence: rs11772725"
  misc_feature (140)..(140): n is a, c, g, or t
  misc_feature (227)..(227): n is a, c, g, or t
  misc_feature (373)..(373): n is a, c, g, or t
tggctcatttccttacttcacatctttttcaaaaatttcctttacagtgaagtctcccttggtcaacccatccaaagttttaatagcccccacgtttcacataccctcttccttttttcttcttcttagcacttaacacnctctaacctacaattatttatttatcttgtttcctagacctaagttccatgaggaaggagattttaaaattttcatctagtcactantatgtatctagtacctggaaaagtagcttgtatatagtagacactcaatacatctttttttgatgaattgagtgaatattctgttatgagattaaattattagaataaataaaagtgagaaaacatacagaagacatgagaagggnaagctgtgaatgtgttacttgactggat

SEQ ID NO: 134 - DNA, 401 bp, Artificial sequence
  /note="Description of artificial sequence: rs11772749"
  misc_feature (262)..(262): n is a, c, g, or t
  misc_feature (288)..(288): n is a, c, g, or t
gtcaacccatccaaagttttaatagcccccacgtttcacataccctcttccttttttcttcttcttagcacttaacactctctaacctacaattatttatttatcttgtttcctagacctaagttccatgaggaaggagtttttaaaattttcatctagtcactactatgtatctagtacctggaaaagtagcttgtatacagtagacactcaatacatctttttttgatgaattgagtgaatattctgttatgagattaanttattagaataaataaaagtgagaanacatacagaagacatgagaagggtaagctgtgaatgtgttacttgactggataaatgaaatacatatagcttatgctaataagaatttttacatggcaaagaaaagcaaagcc

SEQ ID NO: 135 - DNA, 401 bp, Artificial sequence
  /note="Description of artificial sequence: rs11764613"
gctttccttgcatttagatgtgatcatgtgactaagttctagacaatggtgtattaaccaaagtggtgaaacttccgggtcatacccctaaaaaaacttctatgtcatacccctaaaaagcagctacttgcctttcactccctttctccccacttgcaggatagaaggcagatgtaatagtagtgatctgagaccataccaacaagggcaataccataggaaatggcagaatccccagacagaagcaacttgaacacattggaaacataagcaatctacctctgagaccacctaccagcttggacttttatgtgagagagaaataaatatctactttaagttatcattgtttatctgtgttaatacaaccaaagcaatatttaacctgacagagtactctt

SEQ ID NO: 136 - DNA, 401 bp, Artificial sequence
  /note="Description of artificial sequence: rs11768060"
ggaactgtgagtccactaaacatcttttcctttataaattacccagtctcgggtatttcttcatagcagtatgaaaatggactaatacactcaggataagttgcattttctaaataaattcctcaaatagaaattattccacatgttccttagttctataatatctcttatttacttgaattatcgaggggaataatctgacatttttgtttgttttgtttctcctttttaaaaaaagtaacattcacattaccaaaaatttagaaaatcacaaaaaaaatcacaaaggagaaaattaaaataaaccacaattccaccaactagagataatcattgttaatattctggtcatattcaaccaatcaggaaatcataccatacatactatcattaactactct

SEQ ID NO: 137 - DNA, 401 bp, Artificial sequence
  /note="Description of artificial sequence: rs17147527"
  misc_feature (76)..(76): n is a, c, g, or t
ataaaagagtagggaaatctgaataaaaacatttcattatcataatgataaaaacctttccttctggagcacaccncctcctcagcgatatctgtttcctaagtcattattctctctcacccaaattacttccttcagtcagtcattgccaatcctgcagtagataccatgtctcaggatattcctaactcactctaaacatacattattccttatatgtctcatatcctagtatttcaaaatttaatatgggttatgattagtatataggtggatgtgtgcataaattaaacagcataaatttttacaataaagacatttgattcattttcactttactgtgagctccttgagggcaagaactgtcttatcatctctgcaaccacagcactcaccacagg

SEQ ID NO: 138 - DNA, 401 bp, Artificial sequence
  /note="Description of artificial sequence: rs17147529"
agactgactgtgcaacagtgtagagctaaaaatcatcttcataaaccacttacagtactttaacttttctgatgaaaatatgagacccggagaggttatgcccaacatcataaaaccagcttggggagaattagaattaagtcaaagggtttctttcagttcacttactcaatcatgatgacttggccttattagcatcacggttattaaataaaacaatcaagcagaagcttttctagaaatatgtatgtaaccaaaacctttcttaaatattttaacaaaaatatgtaatttaacaccagagatttcaagagatacgttactctaattttaaaagtacttagcagacatgttcccaagcacttttctatattctattacctctggtatgctgctgattt

SEQ ID NO: 139 - DNA, 401 bp, Artificial sequence
  /note="Description of artificial sequence: rs11762669"
  misc_feature (383)..(383): n is a, c, g, or t
tatacatttggtgaaaatttgccaagctaaacatttcataaactgtacatttttctgtatgtatattatacattagtaacaccagtcagccctgggtctcttatcttccacttgatagagatcaaatgggagccctcattgtatagctgagctcacatggacactcacttgtttagcacgcatgcaagctcagaataaaactgttcctccccaaacttctctgtctcctgcagaactcaaaagggagtctatgacatgcctccctatcctgaaactttcacagtctcaccaccactgtctgctttaggtccaccaggactaaagtctttattcccttcatctctgtttatgtccagcaccacaagaagctacagacacctagntgacactcatctcacaca

SEQ ID NO: 140 - DNA, 401 bp, Artificial sequence
  /note="Description of artificial sequence: rs13225964"
  misc_feature (107)..(107): n is a, c, g, or t
  misc_feature (308)..(308): n is a, c, g, or t
taaaagaacatggtagggtactggagaaaaagtattcaatttacttagacccagctctgccacttgctagcatgtggttgcagtatttttctcagttggaatgaagnaaaagaaaaaagatgagaaaaatctatcaactggtatttaccacagtgcctacatactggtaacaagagtgatccaaaaacatgggtgtgactaaagttgaaatgccaaaattagaccaaaattcttatttgcccctaagtcagaggttttctgtttggttttggtttcctttgctttatggcaaacattttttttttttnattctggggctgagacctttgttcagttctctaatttagtttaccctactttcagaactctgggaaaactgcctccaaacgatgaaagagcaa

SEQ ID NO: 141 - DNA, 401 bp, Artificial sequence
  /note="Description of artificial sequence: rs11771543"
  misc_feature (46)..(46): n is a, c, g, or t
gcacttccgggaagagaatgtcccagcagggctgggggcagagggnaggaatggggttgagtgtagagaatgaaaaccagctggattttcaagctttctggcttaagaatagttgatgacagtttctacaactacataatttaacctatcagccataaaataggataatgtttaatactgctacagataacactagtcctcataaacaagggaaaagtgaactataacagttgtttgatgatactatgaaataaaaatctcccagaaagatctttctctgaataactcatagaaaaaacagtttctctgaaaatgtggatgaacctctggtaacatgatgattgttgagggacaaagacaggtttacttaacctcaaatcccatctgtcagagttttgtcc

SEQ ID NO: 142 - DNA, 401 bp, Artificial sequence
  /note="Description of artificial sequence: rs17370052"
  misc_feature (137)..(137): n is a, c, g, or t
cttgctgcctgcattacagactgactggagtatatgaacattccatcacagggtctatttatcacactgagacattgtaaatgtggagagagtagccaagagtgagaaaatggggcaagtacttgggaagggtaacncattacacactaagtagccaccctgaacagttagatatcagaacccctgcagaaatctcactgaaagggaaaccctaaaggatagttaagcctcaactgagcagagggccaaggacagtctgaaatgtgggaccacattcaatgaagcctcattcaaaaggaaagagagtggctccaggctaagccagggcttagagatggaaggggaagaaggaaccttggaagaaggtgtgggtatgaggtcacttaaaagaaaggtcaatc

SEQ ID NO: 143 - DNA, 401 bp, Artificial sequence
  /note="Description of artificial sequence: rs12674362"
  misc_feature (24)..(24): n is a, c, g, or t
  misc_feature (262)..(262): n is a, c, g, or t
  misc_feature (306)..(306): n is a, c, g, or t
cagctatttacagtaacaatatgntaacataaaggagttggattaacttatttactcctacttatatttataaaacagaatagaggctctaaaaaactggcaatagttaagattatgtggatcaactgacataaaatgaatttatcttgtctaagaatttcaagtgtttcctaatttagtaatattctgaagtatgtttcccactgacaactgctcactaatcacagtgaatcttttgaaagacaattgtttttcctgcccncagtaaatcaagaaaacactaagaatagggctgtgcttttattnagcactttctgtgaggtaaagcacagaaatagattcgtatttaagtgtgtattatctcattaatgaaagctacagttgccatcctggctaacacg

SEQ ID NO: 144 - DNA, 401 bp, Artificial sequence
  /note="Description of artificial sequence: rs13230424"
ttaatctcatagatctacattcaaattctgggctcattaagtctttaatttgtttttgaagcagttgtaattgaaacgaactggggtccactagcctggcacagtaaggccaaaaatctataccaaggtttgtagccagacaaaggatgtttatttgcggggcaccaagcaaggagaatcaggcaactcacacttaagacactgtctccccagtggcttgcaagtaagggtttttgtttgtttgcttgtttgtttttgagatggagtctcactctgtcacccaggctggaatgcagtggcatgatttcggctcactgcaacccccacctccccggttcaagcgattctcctgcgtcagcctcctgagtagctgggaatacagacgtgcaccaccacaccag

SEQ ID NO: 145 - DNA, 401 bp, Artificial sequence
  /note="Description of artificial sequence: rs10950935"
  misc_feature (81)..(81): n is a, c, g, or t
ctgtgttagccaggatgatctcgatcccctgacctcgtgatccgcccgccttggcctcccaaagtgctgggattataggcntgagccaccacgcctagccacaggttaagagtttttaaaggcaggggtaaatttcaggaaaccagaagttataggcaacaattataaattaatatatgaaggttatatattggtttgacataaaaaggatagaacatcttgatgtgggggcttacaggtcctaaggagattttaagattttctgatttgcaattagttaaggaaaagaagctctatttaaaattttgggtcaacaccatgattgtatatttagaaaaccccatagtctcagcccaaaatctccttaagctgacaagcaacttcagcaaagtctcaggata

SEQ ID NO: 146 - DNA, 401 bp, Artificial sequence
  /note="Description of artificial sequence: rs11632524"
  misc_feature (190)..(190): n is a, c, g, or t
taggttaaaaagctagcctattctaacaattctgagttataactgactgactaacttttaagattagcagatcattttttatgcaaatgcagtgtgttcatgtatggtatcttaaagttgaactgtttttaaagaattattaatccatccaattattatcaatatgatttgctgtggactttatttcaantttcgtatttcaagtatttctctggtgtttatactataaactgacatttttaattccacttcttctagagtggaatcaggaaaagcaggctgcttttctcctaaaatcagccataaagaaaaggttcgaagatctctgcgtttgaaattcaatctagggaaaaatggcagagaagtagtaagtttcttaccattttattgatctttatatt

SEQ ID NO: 147 - DNA, 401 bp, Artificial sequence
  /note="Description of artificial sequence: rs12583395"
  misc_feature (180)..(180): n is a, c, g, or t
aaaaaataagatgattggaggacaatcagtagtgtctgtgacatctacaacggagcagttggagaggagtaggcaaatccctatctactggcaagaaagatgtccaagaacatttccaagtgaggacgcaggttgtgaggtcatatgtccattatcacccatctaaggttctgaaaacanacatttatcaaggcatggagaaagttctggaagttacactctttttctctcagagaaagctggaattggggtttggaaagaagaggaaatatgtctatttactcaacatacttctgaattctttaattgttgaaatcctctaagaacttgtattctgcggtcatttttaaatacaagggaaaaacaaacaaacaacccaggctgtaaggaagaaagtgata

SEQ ID NO: 148 - DNA, 401 bp, Artificial sequence
  /note="Description of artificial sequence: rs17264110"
  misc_feature (118)..(118): n is a, c, g, or t
  misc_feature (169)..(169): n is a, c, g, or t
aaattcagtctttatgaaggacagtttagtcatagctggttgctcttgagaagtgtatttaggtggagaacttttctacttttgctgtttagaatcttgaaataaacatgtttttaanaaatacttatttctgttaacatgttctatttaactactataccagcagtanatgattttgtgtttatgatgaaaaaactcaaatgattgacagatttaatagttagaataaaaatcaaagtcacctttacctgtcttctcccattctcattttcctttccagctttccagctttgaggtaatcactgttcataatttgatgtatagccttccaaacctgtttatgtgcctttatggcttttgtaatttagaactttgatgtccacagcacctctgaggaaagg

SEQ ID NO: 149 - DNA, 401 bp, Artificial sequence
  /note="Description of artificial sequence: rs17181845"
  misc_feature (22)..(22): n is a, c, g, or t
ttctttaagctccagactttcntctcctcttgaattcctccttttcccccaccgactacactcaatttatattctggcctccccactacccattctccatacaacagtctgggtggtctttttaaactataaatcaggccatcataccaccccatactcaaaatatacaatggcttctcactgaccttagaatagaatctgaatgccttgctatgccctgtaagttcttgagtgatatgggacctgctttgcgctccagtatcttctcatacacctctcctcctcttagtcttgtaccaacctggtctcctttcagtccttgaattcattaagaacagtcctgccttaggatttttgcccttcctcctttaccaggaactagtcctaggcccccaagccct

SEQ ID NO: 150 - DNA, 401 bp, Artificial sequence
  /note="Description of artificial sequence: rs16985655"
  misc_feature (173)..(173): n is a, c, g, or t
gttggtatttttttcagtgcgagttgtctaggttctttcacaatcaagattttaacagaattagtattttaaaatttatcaagagaattagtacgttatttttctactcaattctaagactctactcaattctaagacacaattatgcctagttcgttataatcatagaaaanccccaaataaatttcatgttttagaagatcaggttgttttctaagtatttttctaaaactggatgaaaatttttcatgttaaaattaatttttcattactttcacactggtcttgggggtctgtttctcactgcacagaggaaagtcgatccttaaatgttattatcatggtgcctgtgtacattttaatcctgaaattattaattttaggattaaggccaggtgcag

SEQ ID NO: 151 - DNA, 401 bp, Artificial sequence
  /note="Description of artificial sequence: rs16985677"
aataaataaataaataaaaataaataaataaatccattccaccttcacagggctcaggcaagcacagcagagatttttgttagcagcaaggtctagggtgtgaatcaagattcacactgaggcaactgtgacgtttccaggatcctaatagaaaagtgtagcctatgggaaatagtatatctaagaggctagtagcttggattgtagactcagcctttttggcttcataagctcacttgctgtgaggctgcctcctaaccaattactcaaacccccaaagcctcagtttcctcatctgtaaagtggaggtaatgataggagctactgcaaggggttgcagagattaaatgagataatctatagaaaacactccacaaagggccagtacactaaaattccca

SEQ ID NO: 152 - DNA, 401 bp, Artificial sequence
  /note="Description of artificial sequence: rs11628088"
  misc_feature (266)..(266): n is a, c, g, or t
  misc_feature (380)..(380): n is a, c, g, or t
caaatggcacagaatagaaaacccagatataagaactcacatctacaactatatgatcttcaacaaacctgacaaaaataagcaatggggaaatcatttcccatttaaaatacggtgttaggataactggctagccatatgcagaaaattgaaactggactccttctgtacaccatatacaaaaattgactgaagatggaataaagtctcaaatgtagaacccagagctataaaaaccttggaagactacgtagtcaataccattnaggacatagacatgggcaaagatttcatgacgaagatgccaaaagcaactgtaacaaaagcaaaaatggacagatgggatctaattaaactaaagagtttttgcacagcaaaanaaactatcaacagagtaaaca

SEQ ID NO: 153 - DNA, 401 bp, Artificial sequence
  /note="Description of artificial sequence: rs12892392"
  misc_feature (240)..(240): n is a, c, g, or t
gttgcccaggctggagtgcagtggcacgatcttggctcactgcaacatctgcttcctgggttcaaacgattctcctctctcagcctccagagtagctaggattacaggcatgtgccaccatgccgggctaatttttgtgtttttagtagaggcagggttttgccatttttgccaggctggtctcaaactcctgaagtcagatgatcaacccgcttcggcctcccagctccagctggaccnaaatatgcttatacattgaagcaataactttttaagttatgtattttattatgtttacaaatttatagaaaaatagcaatcttaagttaagcctaataactttcaaaattgatagaattgaaaatatatttttttaattgtattaaaattaattaatcaaa

SEQ ID NO: 154 - DNA, 401 bp, Artificial sequence
  /note="Description of artificial sequence: rs1431032"
catttgaggcataagcctatgccttggctgtgtttccctctgctggaattgtttacccttccttccactcagaaaaatcttactcctttaaagcctcagctgaactgtaacctcttccaaatcaacaaggaaagtccatttccacctccactggaatcccttggcattttaattatactgttcatatagctgttcatgacatggctgactttgtcatggtccccatgagagctccattcacgcaggcatcagcataacataattcctgggcctgttgtccatttttgtgcctttcccatttttgttaaaagtttaattttaaaagcctcatcattatttccaattgctgtttctccattttctcctcctaaacaacatacaactcttcttgacaaagttat

SEQ ID NO: 155 - DNA, 401 bp, Artificial sequence
  /note="Description of artificial sequence: rs13038759"
  misc_feature (49)..(49): n is a, c, g, or t
  misc_feature (193)..(193): n is a, c, g, or t
ccagaactccacatcctcaatgtcccaggggcctcactcctgctcaatnctctacccctgactcgcaacctcagtaagccaatggggctggagtctttgttgagtgaggctgtcctatgcactgggggatgtttagcgcaactctggccaccaatcattagatgccagcagtgtccccatcaccccctcaaantcatttcaagaactaccactctaacccaatcccacgtacacgtcaagattcccagaattacacctcctgcctgaacctggccacagggaaccctaattcctgcctccagctgccctattgacctctccacctaggggtgtaacagctgctcaaatttacataatctaaactagacccttggcttctcctgccatacccagatctgtca

SEQ ID NO: 156 - DNA, 401 bp, Artificial sequence
  /note="Description of artificial sequence: rs1621025"
  misc_feature (44)..(44): n is a, c, g, or t
ttgaaatacgtgttgccttaggaatccctcttcaccactcagcntaaggttaactttgcttattgatgaaaatcattattactatggtagtaatatcactttcacccttgctgccacagctgctgcctattctattgccttaaagttttcaaagcatagcaaatggtagctacccagaaaattgactgaactatttaggacagtaagcgtttaattgaggttttgttcttcactgaaatacatcaattaaagcaacattttaaaaaagataatttctaaaaaaaaaaaaaaaattcagacagctgtcaaggaaattttatgccaaaatatattctcagtgatttttccatttgcaggtatcaccattctactttcttccaaaagaaaggagacttgaatct

SEQ ID NO: 157 - DNA, 401 bp, Artificial sequence
  /note="Description of artificial sequence: rs1769522"
  misc_feature (26)..(26): n is a, c, g, or t
  misc_feature (81)..(81): n is a, c, g, or t
ttatgttgtttcagtctcccaatctntggtattttgttatggcagcacaagctaatatacatgaaatgggaaaatttaacnctcattgaggggacagtgatgatataaatctttacagagaagctgactgtggtatgtaaaataatgttccttcccacagaaacttgtaaatatgttaccttacatggaaaaataggtctatgcagatgtgattaagttacagatccagaggtgtgatgattaatttagattgtcttggtgagtacaatttgaagatggaagaatgaacagtgacccagggaatgcagttggctctcagaaaatggaaaagtcaaggaaatgattatctcctagagctttcagatggaatgctgtttggccaagaccttgacttagcccaa

SEQ ID NO: 158 - DNA, 401 bp, Artificial sequence; identical to SEQ ID NO: 5
  /note="Description of artificial sequence: rs12589623"
  misc_feature (276)..(276): n is a, c, g, or t

SEQ ID NO: 159 - DNA, 401 bp, Artificial sequence
  /note="Description of artificial sequence: rs11157633"
tttctgttaataaataactagtttttactccttctataaatgaacatcttagttttagtttagttagatttaacagtctaaataaaagaatgttttttctatttcttaccttcattagatcatattttttattaggcctggatgctgaatactaaatccattcaataaggacaagattgatttatcatattcatttgaagatggtggtatctaatgagtatacaagaagatgttttgcctttacaataaattgatgaaatttcattatactcagtataatctttaggtactcaaagcaaacttgctggcactggtgggaaagatcagatgttagaaaccataacttgaggaccaaaagacaacagtatccttattacctaatcagaagataagaaaggcaa

SEQ ID NO: 160 - DNA, 401 bp, Artificial sequence
  /note="Description of artificial sequence: rs1872133"
  misc_feature (193)..(193): n is a, c, g, or t
agcaagggcattctgtacaaagacaacagcttttataaaaggcccagacttgtttagcaaataataagagattaattgtgaactaattgtgagtggcaggaaatgataggagatgaagctggagaaatttggactggctcatttgcctcttgaatgggtttttctaggaagagtcatggcggatttccagtcntggttctcgctatgtgaataggaatatatatatatatatatatgtatgtatgtatacatcatgggtttttataagtgatgagatctacagttttggaatagagtaaaaacacctagtttgtgctgggaattatacccataatctcgttcaccttcagattcatcttctcatcaaatgtactaattagacacacagtagtaatacaggc

SEQ ID NO: 161 - DNA, 401 bp, Artificial sequence
  /note="Description of artificial sequence: rs1872132"
  misc_feature (209)..(209): n is a, c, g, or t
aaaaacaaagcaagggcattctgtacaaagacaacagcttttataaaaggcccagacttgtttagcaaataataagagattaattgtgaactaattgtgagtggcaggaaatgataggagatgaagctggagaaatttggactggctcatttgcctcttgaatgggtttttctaggaagagtcatggcggatttccagtcatggttctngctatgtgaataggaatatatatatatatatatatgtatgtatgtatacatcatgggtttttataagtgatgagatctacagttttggaatagagtaaaaacacctagtttgtgctgggaattatacccataatctcgttcaccttcagattcatcttctcatcaaatgtactaattagacacacagtagta

SEQ ID NO: 162 - DNA, 401 bp, Artificial sequence
  /note="Description of artificial sequence: rs163135"
  misc_feature (1)..(1): n is a, c, g, or t
naggtaaatgtgtgtcttggaggtttgttgtacagattatttcatcacccaggcattaagcctagtacccattagttatttttcctgatcctctccttgccacccttgagctgaactattaataaaagagaaatgaataggaataaagggaaggaaggagggaaccctcctggcacagggagtggcaagcacaaaggactggaagtaagacagcacacagggcggcacacctgctgcataaagggaaggtggcagaaactcagctgagaggtaggccagggcccagtcaccaagggccttttaggccactgtaaagattggggtctttgtctaaagagaaacttgaagtcattgaaaggatgtcactagtgacattcataatccaactgagtcttcagatc

SEQ ID NO: 163 - DNA, 401 bp, Artificial sequence
  /note="Description of artificial sequence: rs12148406"
  misc_feature (79)..(79): n is a, c, g, or t
  misc_feature (118)..(118): n is a, c, g, or t
aactagattggccagtggaaatgacaaatctcttagctttcttgcttctagggccaatctatgaaaaggcagaaatttnctcccaagttttatcaagactagttttgttttgttttgnttttaattgcaaaccaacctgaatccagttcccaaaagggaggaataatcaagaactacagccatctgtactagctgtcttacgaaagctgtagcagtaacacctagagtaggcaccacttggaactcatgcagtagaaaactgtgagcaatgtgcactttaatcagatgttcaaccttgcccagctctctcctctgataatcagttgggactgtcctgaaatgcaaatacctaatagcatagtctacatggtttcatctgggtcacacctatgtggccattt

SEQ ID NO: 164 - DNA, 401 bp, Artificial sequence
  /note="Description of artificial sequence: rs17270048"
  misc_feature (340)..(340): n is a, c, g, or t
aattcagcttccacactatttcttctaaaatcaaaactcagcaaattcagattactctcccatcaaactcagaaattctgttttggtatttatctgtggactcttaaaatgccacaacttataacaggaatttgcagcattatggaatcaagagttccattaaatatcacgcattcaacaactatatttgcataaagtagaacccatgtaccgcaaacgggatgggagaggggaaaaatcccctgccctcgccgagttcgcagatcccatctgaaccaatcaataacattatcaattgtagacagaggcacctacagagaattctaaaataaaaccacangtgcagatacatagatgggggcctgaggacacaaaaactgaaaggaaaaaagaaacccagc

SEQ ID NO: 165 - DNA, 401 bp, Artificial sequence
  /note="Description of artificial sequence: rs17270055"
  misc_feature (62)..(62): n is a, c, g, or t
ttatggaatcaagagttccattaaatatcacgcattcaacaactatatttgcataaagtagnacccatgtaccgcaaacgggatgggagaggggaaaaatcccctgccctcgccgagttcgcagatcccatctgaaccaatcaataacattatcaattgtagacagaggcacctacagagaattctaaaataaaaccacacgtgcagatacatagatgggggcctgaggacacaaaaactgaaaggaaaaaagaaacccagcagaccagattcttcgtaaacctcactgcttcactcctaaatggatccaaagtccaacagcttcattacaatggcctgactcaggagcaggagctttgaaatatcgcatcatggtggcaaacggaggggtgaaggggatc

SEQ ID NO: 166 - DNA, 401 bp, Artificial sequence
  /note="Description of artificial sequence: rs10851673"
  misc_feature (99)..(99): n is a, c, g, or t
  misc_feature (371)..(371): n is a, c, g, or t
tataagatatgaaaacaaagaaaatttccattgacagatgagtaaaaatgtgatagacatacaatgaaatattattcaccttttataaagaagaaaatnctaccatttgtaacaacatagatgaacttaaagaacattatgctaagtgaaaagccagacacaaaaggacaaatactgcatgattgcacttatacgaggtacctaaaatagcaagactcagaagcagagaatagaatggtggttgaaaggggctggggaaaggggggaatgaggaattgttgttcagcgggtataaagtttcaggtatgcaagatgaataagttctagagatctcctctataacatagtacctgtagttcacaacatgatgntgcatactttgaaatgtgataaaagaacag

SEQ ID NO: 167 - DNA, 401 bp, Artificial sequence
  /note="Description of artificial sequence: rs12912083"
  misc_feature (130)..(130): n is a, c, g, or t
  misc_feature (335)..(335): n is a, c, g, or t
ttgaaaggggctggggaaaggggggaatgaggaattgttgttcagcgggtataaagtttcaggtatgcaagatgaataagttctagagatctcctctataacatagtacctgtagttcacaacatgatgntgcatactttgaaatgtgataaaagaacagatctcagatctcatattaagtgttcttactacaaaagatactctcaaaaagaatacaaggacatttttgtaggtaatgaatatagtatcttggttgtggtgatggtatcatggctgtatatgtatatatctaaactcatcaaaatgtatacattaattatgtgcaattttttttnagatagactagctctgtcacccagtttggagtgtagtggcatgatcttggctcactgtaacctcca

SEQ ID NO: 168 - DNA, 401 bp, Artificial sequence
  /note="Description of artificial sequence: rs1680195"
  misc_feature (19)..(19): n is a, c, g, or t
  misc_feature (382)..(382): n is a, c, g, or t
aagttaggttatttaattnaaagtcatgtagttggtagtttatggaattgagatttcaatgaagggtcttcacctctaaatctcagggttttttgttttttgtttttttttttaaagttttgtgacattgaaactgaatttggaacaatgtttacatttgtagtatcttctttgttactaaaagattgtgttttataaaccctcttagagcatctgctgctctagagcaggggtccccaacccccaggctacagaccagtactagtccatggcctgttaggaactgggctgcacagcaggaggtgagtgagcatgaccaccttagctccgcctcctgtcagatcagtggaagcatcagattctcacaggagcgtgaaccctntcatgaactgcgcatgtga

SEQ ID NO: 169 - DNA, 401 bp, Artificial sequence
  /note="Description of artificial sequence: rs16942291"
  misc_feature (19)..(19): n is a, c, g, or t
  misc_feature (252)..(252): n is a, c, g, or t
cagcagatgctctaagagngtttataaaacacaatcttttagtaacaaagaagatactacaaatgtaaacattgttccaaattcagtttcaatgtcacaaaactttaaaaaaaaaaacaaaaaacaaaaaaccctgagatttagaggtgaagacccttcattgaaatctcaattccataaactaccaactacatgactttaaattaaataacctaacttctctggacctcaatgtactcatctctaaaactnggatacagtagtaacacacctcatgggcttgtcaggaagatgaaatgatgtaacatatgtgaaagggctttgtaaatgaggaattattactgattatagggaaaggggagaaggatgaagaaacagaggaaaaaggagagagaaggagg

SEQ ID NO: 170 - DNA, 401 bp, Artificial sequence
  /note="Description of artificial sequence: rs12148854"
  misc_feature (37)..(37): n is a, c, g, or t
  misc_feature (274)..(274): n is a, c, g, or t
acttctctggacctcaatgtactcatctctaaaactnggatacagtagtaacacacctcatgggcttgtcaggaagatgaaatgatgtaacatatgtgaaagggctttgtaaatgaggaattattactgattatagggaaaggggagaaggatgaagaaacagaggaaaaaggagagagaaggaggaaggagaaaaaggaagaagtgcccagcatctgctgaggggactgggcagccatgcgggcagaagttctttctcccacactctcaggtntacacaaggaggatgtttctagctaaataaggcagacaaggattttgccaaaattttacatctacccgattagccccctcccatgtggtcagcttgctcctgattctcaggctctatggctcttctg

SEQ ID NO: 171 - DNA, 401 bp, Artificial sequence
  /note="Description of artificial sequence: rs1680222"
  misc_feature (136)..(136): n is a, c, g, or t
  misc_feature (219)..(219): n is a, c, g, or t
  misc_feature (280)..(280): n is a, c, g, or t
  misc_feature (344)..(344): n is a, c, g, or t
atgcctagaatcatgctaaatatgtactaaggacttgaaaaatagtaattttattagtttcttaaccctgtgactgagtgggtttttcagtgtcaaatgagaacttaaatttactgtgttacacagaaaatgttgntactgtaaaacaatttttaaaacaattatgaagcacccttaatgataattacatgataccaagacgtttgcaccaacacagtncaaatttctgcccatcactttaaggtttattatatatattatcaaatatatagattggctngatggaatttattcccgagaagtctatagttgatattctccaccctgggaagacagactgttanaattaggcaactgctttggggaggcaagaccatatagacaatgtgttcaaacatttc

SEQ ID NO: 172 - DNA, 401 bp, Artificial sequence
  /note="Description of artificial sequence: rs1680221"
  misc_feature (16)..(16): n is a, c, g, or t
  misc_feature (36)..(36): n is a, c, g, or t
  misc_feature (60)..(60): n is a, c, g, or t
  misc_feature (266)..(266): n is a, c, g, or t
  misc_feature (284)..(284): n is a, c, g, or t
  misc_feature (345)..(345): n is a, c, g, or t
tctccttagtaaaacngtaagttatatgtagaagcnatattttatacttttcttctgccngtgccatgcctagaatcatgctaaatatgtactaaggacttgaaaaatagtaattttattagtttcttaaccctgtgactgagtgggtttttcagtgtcaaatgagaacttaaatttactgtgttacacagaaaatgttgatactgtaaaacaatttttaaaacaattatgaagcacccttaatgataattacatgataccaagangtttgcaccaacacagtncaaatttctgcccatcactttaaggtttattatatatattatcaaatatatagattggctngatggaatttattcccgagaagtctatagttgatattctccaccctgggaagacag

SEQ ID NO: 173 - DNA, 401 bp, Artificial sequence; identical to SEQ ID NO: 1
  /note="Description of artificial sequence: rs1630535"
  misc_feature (101)..(101): n is a, c, g, or t
  misc_feature (125)..(125): n is a, c, g, or t
  misc_feature (145)..(145): n is a, c, g, or t

SEQ ID NO: 174 - DNA, 401 bp, Artificial sequence
  /note="Description of artificial sequence: rs12899914"
caggtgctgccttaaggcgtttgctgctattactctctctccaatacattacatctctgctcatgccatattcaaatgcaagtagcatgtttttctcctcaattcttagatcaagaacaaaaaaaaatcctatctaatcaaaaaaggcactgacaatttttcagccccacattaaaagcaaagagtcattcagaacagtgcactccatattctattttataatatcactttaagctattgctttgaatctcagacatttctttgttaagaaggaaaatcaaaaattcatcagaagaagttctttcttcccccctctcttttttttttcttccagggctagcatggggtttggagctggaaccaacatttgtagaagttaggggtccttaagcaattattag

SEQ ID NO: 175 - DNA, 401 bp, Artificial sequence
  /note="Description of artificial sequence: rs173945"
  misc_feature (164)..(164): n is a, c, g, or t
cttaggcctccgacagaaatccatgtatagagggttcaaaggtaattccaaacagttcacatgataataaggttagtaaccctcccctaaactcatagcaacatgtgtcatttgtctttataaggtaagattattctctggttttttaaaagtatgtctaatgntgtgctttttgaagaacaggataataaccaactaaactttcaccaaatttcctaaaaattgactgaaattgactccttttgtgagtgttaaaaggatatgaatttacatttccactgctggataataaaatggtgtgatgagctgtaccatggtgagattctacacaagtgaggcactcatgaaagtggtacttggagcccaaggtaatcagggaagatgagctcctgagtgtggat

SEQ ID NO: 176 - DNA, 401 bp, Artificial sequence
  /note="Description of artificial sequence: rs159608"
  misc_feature (255)..(255): n is a, c, g, or t
agggaaatgactgaaaaagaaagttcatttgtctttatgatgttaccaagtaggaagtagtttgaagtgttagttttcatctttttcagatgagttgagaaaaccaatttaactaaattaatgcaattaattagtggtgacctgaaatgcaatatatctacctatgctttcacaatcaaaaagcatttgttatgcttcacatattgacacaagtgatctatccacaacactgcaaatttcctctgcagatgagcnttttcaaatgtttgccttacccaatatttcaaactttcccccactcaaacaagctaaaaattacaaagaacaaaggaaaacaaaactgcaagattttaaatttaccttaggtgtccaaatacttatggatttttatttatttactt

SEQ ID NO: 177 - DNA, 401 bp, Artificial sequence
  /note="Description of artificial sequence: rs10763541"
  misc_feature (273)..(273): n is a, c, g, or t
  misc_feature (313)..(313): n is a, c, g, or t
  misc_feature (369)..(369): n is a, c, g, or t
cctttcacccagcaaatattctttctaggtcctcttcttaaattattaacctccaatggtaatataaaaatatactgggtttttttggttttgttttgtttttttttgttttttggtgggtgttattgttgttttacatatcgggacatagggagcttgtatctttttaaaggctgcattgtattccattgtatgactataccataactttttttttttttttttttttttgagacggagtctcgctctgtcgcccaggcggagtgcagtggngggatctcggctcactgcaagctccgcctcccgggttcangccattctcctgactcagcctcccaagtagctgggactacaggcgcccgccactangcccggctaatttttttgtatttttagtagag

SEQ ID NO: 178 - DNA, 401 bp, Artificial sequence
  /note="Description of artificial sequence: rs1427219"
  misc_feature (97)..(97): n is a, c, g, or t
  misc_feature (377)..(377): n is a, c, g, or t
ttaggatgcagggctttgccaattgtgtggcctgggatgacagccaattgatggaagctggaattcagggctttcttctcaacagaagttaaagaangcaaaaaaaaaaaaaaaaacccaaacaaaaaatctggccacaagtgatgtctatcagtgttgtgtgggtgtgagagcctgcccctttgtcttaatagagaatagaaacatacctgaggaggagccccaaaggcctgataggaatgggtcattttgagaaaaagtttccaatgggaaagataaaaatctagttgttttgcccttcaatgttttagagtttcctcagagcacagagaaatcttagtttgcttctccttaaggtactgctcataaagtcccgncttttaaagaaaaggaacagagtg

SEQ ID NO: 179 - DNA, 401 bp, Artificial sequence
  /note="Description of artificial sequence: rs10826187"
  misc_feature (90)..(90): n is a, c, g, or t
  misc_feature (254)..(254): n is a, c, g, or t
ctagctttgcttttgccatcacattttaccctgactcttacactcccacttcctctttcaccaagcaccctgtgatgacattgggcccanctggataatcccggatactctctctctctctcttttacagtcagctcattaataacctcaattccatctgcaaccttaattctcacagtttctggggattagaatgtggtaatctctgggggtgactgttattctgcctactgcacccaccttcaattctactntcaatcaaaatttacttgtatgttcttcaatgactcctcattagctaaaaagtgaacctaataattgaacccaaacagaaggtgttaaacggaaatatgtaggacctgtccctacttattctcctgtccctgtttacatatcatgag

SEQ ID NO: 180 - DNA, 401 bp, Artificial sequence
  /note="Description of artificial sequence: rs10826188"
  misc_feature (37)..(37): n is a, c, g, or t
  misc_feature (148)..(148): n is a, c, g, or t
tctttcaccaagcaccctgtgatgacattgggcccanctggataatcccggatactctctctctctctcttttacagtcagctcattaataacctcaattccatctgcaaccttaattctcacagtttctggggattagaatgtggtnatctctgggggtgactgttattctgcctactgcacccaccttcaattctactatcaatcaaaatttacttgtatgttcttcaatgactcctcattagctaaaaagtgaacctaataattgaacccaaacagaaggtgttaaacggaaatatgtaggacctgtccctacttattctcctgtccctgtttacatatcatgagtcaagcatggttctcttctatctgaacccaaatgagccttcagaatccttttt

SEQ ID NO: 181 - DNA, 401 bp, Artificial sequence
  /note="Description of artificial sequence: rs10763545"
  misc_feature (12)..(12): n is a, c, g, or t
  misc_feature (20)..(20): n is a, c, g, or t
  misc_feature (263)..(263): n is a, c, g, or t
  misc_feature (267)..(267): n is a, c, g, or t
atcacaatctanatgctagngacactaatgactcctgcactctgattgtttcttttagtggggtgtatgttcataatcagaacttagttttaattctgtcagtttagcaatgtttttattaatgattaatccttttttgtgccttgttttaggatatttccttacttggaagttacaaaaatattctcccatatgatgctctgaaagggttgaatattttgcctttcctatttagggctgtgaactaactggaattgattttnttanatggttagggttccagtatcattttccctcaaaataatgctcaacttttctataattatttattgaaaggttcacctatttctgacttctctgcagtactatccctgtagtaaatcaaatatctttatgtgtgt

SEQ ID NO: 182 - DNA, 401 bp, Artificial sequence
  /note="Description of artificial sequence: rs16912268"
  misc_feature (142)..(142): n is a, c, g, or t
  misc_feature (176)..(176): n is a, c, g, or t
  misc_feature (276)..(276): n is a, c, g, or t
ctaggtgggctcgtcgctactggtgcctcattgcttctagctctttacaggagacagtgataggaaactgcttttctaaaataaaaaatataaaaaaaagaaaaaaagataaaagaaaagcctgagtttctagtaatacttntaattcacatgcattaccacatgattatttcttnccttctcccattccatttttgtatctccttcttccatagtgaaaaccctgcttctcaaacaccaccacaaacaatatttgttcacttctattctgcaatncacacagtttttgagctacaacaccatacacctgttaaaaacaaaactagtaaatacagtcaaatttctttgcatttctcgtaattcttcaaaaatatttataattttatatgctttattggtga

SEQ ID NO: 183 - DNA, 401 bp, Artificial sequence
  /note="Description of artificial sequence: rs10826193"
  misc_feature (67)..(67): n is a, c, g, or t
  misc_feature (101)..(101): n is a, c, g, or t
  misc_feature (126)..(126): n is a, c, g, or t
  misc_feature (395)..(395): n is a, c, g, or t
ctaaaataaaaaatataaaaaaaagaaaaaaagataaaagaaaagcctgagtttctagtaatacttntaattcacatgcattaccacatgattatttcttnccttctcccattccatttttgtatntccttcttccatagtgaaaaccctgcttctcaaacaccaccacaaacaatatttgttcacttctattctgcaatacacacagtttttgagctacaacaccatacacctgttaaaaacaaaactagtaaatacagtcaaatttctttgcatttctcgtaattcttcaaaaatatttataattttatatgctttattggtgaatgtatgtgtatatatgcatatatgtttgtgtttgtgtatgtgtgtgtatatatatatgcatgtgtttntgtgta

SEQ ID NO: 184 - DNA, 401 bp, Artificial sequence
  /note="Description of artificial sequence: rs1013473"
  misc_feature (10)..(10): n is a, c, g, or t
  misc_feature (30)..(30): n is a, c, g, or t
  misc_feature (282)..(282): n is a, c, g, or t
  misc_feature (319)..(319): n is a, c, g, or t
atttatatancaaacctgcacgcgtacccngcacctaaaatgaaagttaataacataaaaatatgtctgaaagttttagacagaagattttctcaggaatagacggagtaacaaataaaacagaatagaaagtccagaagcagatccatgaatgtgtggaaacttgatgtagagctgaaccgacaccaaatatcactgggcaaagaatagactgtttgacaaagtgtatgagataaatggaaactcattttaaaaatggaatgggtacccccctcatatcanacacaaaattgtctctagagagattaaaagctgaacngtaagaggcaagatttttaaaaattttagaggacaatatagtggaaaatttttgtgatctttgggcaggtaaagaattctta

SEQ ID NO: 185 - DNA, 401 bp, Artificial sequence
  /note="Description of artificial sequence: rs1030432"
  misc_feature (224)..(224): n is a, c, g, or t
atatttcaagccactaagattatagacttctatttgagatttagccaactaatgcctaccctcaaataaagacccattaaagaatagataactcacccagttccatttccttcatctaagtacaggtcccccactccagcttctgcctgcttttagttgctttccagttgttccagggaattggttttttatattttgcccagattttttgtggttatatgtgnagagttagtttgatgggagctactgaatcattactgggagcaaataacctgattattgtatttatttagcttctgatcagtcttagatcttgcatgacaaacgcttaccttattttaattcttcagtgtcttagctattcttgtgtagaagctgaagtcttatccagtatacttttc

SEQ ID NO: 186 - DNA, 401 bp, Artificial sequence
  /note="Description of artificial sequence: rs10509091"
  misc_feature (134)..(134): n is a, c, g, or t
atctttatataactaaaaatgttttatcttccaggccttatttagaaacaaatgtatatgttttatagctacaaccacacacaagtttgaaggtcttcgatacatcataattttgcattatttctatcatctcncatgaatgagcaattttcatcatgctgatatctgtaattatgtccttttaaatgtcttacatagtagtccatcatttcatacaccccaaacttttaaactattattcaacttgttgtacatttatattattacaactataaataatgtaccacaaacatgtttatgtatatagtctttctcttctatggggggtatctctttagctgtaagatatccatggtgaaaagtagaaacatttaatattgttttatgtatattgatattta

SEQ ID NO: 187 - DNA, 401 bp, Artificial sequence
  /note="Description of artificial sequence: rs1125139"
  misc_feature (109)..(109): n is a, c, g, or t
  misc_feature (226)..(226): n is a, c, g, or t
acatagagttattaatcaattgcttaagatcatagtactagtaagtggcagattaagggttttgattttatatgtttctgacacaaaagcccttattataatgagttcnaaaccccatgagaaattatatctttgagaaagttaattttctctaccagtttttaaaatgatatcttagcaacctgtctgatcctcttcccactacatagtgaacttgtggagaacnggaatcacgtctctgtgtttttgtatcccatgcaacaccacagtattgtgcatagtaagttttccatttgttctaggaaattctgataacctaaatatcagaaggattctgaaaagaaaaacagattcaaccaaaaagaggagttggtgaagttggtctctggcatcccagcctt

SEQ ID NO: 188 - DNA, 401 bp, Artificial sequence
  /note="Description of artificial sequence: rs11230659"
taaactatgaaatatttgcactgcagagtcagcagttaaaaggaacaaggcaagtctatttaccctgatgtggaaacatcttcaagaccaacgttgggcaggggtaaggggaacaagcaaaggaatgactaggttcaaatcccaactctggctgggtgcagtggctcatgcctggaatcccagccctttgggggccaaagcgggaaggatagcttaaggccaggaatttgagaccagcctgggcaacacagcaagacctcatctctacaaaaaaaaaacaaagaaagaaagaagaaaaaaaccttagctctaatgggatcttaagcaagtaacaatttccttaagcctcagtgttcctttcaataaaatggagatagataataccaacttcactgggtaat

SEQ ID NO: 189 - DNA, 401 bp, Artificial sequence
  /note="Description of artificial sequence: rs12960630"
  misc_feature (173)..(173): n is a, c, g, or t
tgtatgttagtgcttcactctgccaggaaaattgaagctcctccctttctttttctgggatagcccctgcatttaatgtatatctcaaatttaccaccgtatcgtcatagtacttcataccacctattattgcctgaagattttttttatctatcaactctctattgtcttantatctcactcctctgtaattcaaactcaataaaagcaaatatttatttctaaagttcagtgctgtatccccggagcacagagcagtgcctttaatatagcaaaactcattaaatatttgttgaattaattgttaagctattaaatctatgagaaaaaatatcattgaaatatttcatattatctttatttttaaagcttgttactcaaaaagttataactatttaaac

SEQ ID NO: 190 - DNA, 401 bp, Artificial sequence; identical to SEQ ID NO: 85
  /note="Description of artificial sequence: rs17175096"

SEQ ID NO: 191 - DNA, 401 bp, Artificial sequence
  /note="Description of artificial sequence: rs17260406"
  misc_feature (51)..(51): n is a, c, g, or t
  misc_feature (129)..(129): n is a, c, g, or t
atctatttttgtacttagaaattagttccaatagctattcttctaaaatanacaaatgttttattcatgactttttaaaatactgcaaactaaaaattacagttgattatttaaaatttttctcactancaaattgcatcacacacacacacacacacgtatcttggcacatattcttttcaaatttcactggaaataaaattatcaaaatattttacctattaataaaatcgcccagcattgattactaattgctatggactgaattgtgccctaacctagtccactctgccagattcatatgttgacatcctaacccaaaatgtgtgactgtatttgaagattagggccttaaggaagataacaaatattaaatgaggtcataagggtgagtccctgat

SEQ ID NO: 192 - DNA, 401 bp, Artificial sequence
  /note="Description of artificial sequence: rs17074095"
  misc_feature (287)..(287): n is a, c, g, or t
gttttgctatctggaaactaaagataaagcagagttagtcttaaaccatgtgtttcaaaaatgtgaaggaaaaaaatgtgatggtgtagtatttacaggttctctgtgtctcaatcgattccctttatgcagtaaaagggaaatgatatgtagatggaagaactgcattgaacttagttcaaatgcagaactaagactgacttagcactttatttttataagtatcatatatgtcatgtgtcacaaaatacaagatgtatttttaatgttcacagttggaaattgcntacaacatacaaaagataaatttgagagcaattttttaaatgttcaggtcttaggtgaaagagtcacaggcctaatacaacatttactatagtaattaattttagatctctaaa

SEQ ID NO: 193 - DNA, 401 bp, Artificial sequence
  /note="Description of artificial sequence: rs1037448"
  misc_feature (305)..(305): n is a, c, g, or t
gagccctgggcatgtgagagtttcataaggtactcttgaccaaccttatgtgttgaaaaacagccttgtccaagagtcaggggactcttccagaacattcaattcacctttgccccaaacaggcctaccagggctaaaacaggtagttgaatgtgtctcatcattagctatttgggcaggtggatgttgatacaggttatccttaggcatcagtgccccatggctaatgctgtaggcagtggatgtttttggaagtagccaagcaggattgctgcttgcccttgagtgctccatgccgtctgccnagctcccatcactttaactaggagaaccggcctccaggatccctccctttggttctaacataggcctcagatcagatccagtgtctgtggtttcag

SEQ ID NO: 194 - DNA, 401 bp, Artificial sequence
  /note="Description of artificial sequence: rs10750955"
ccagcaacacgcttttaccgctgcaaatccggatcaggcaggctttgaagcccagctcacaggccgtctcttggaaactaacttagatttccacctgggagcactttgtcctctcagctcccactgcaccactttatggatcgcgtggtgactcgtttcattttatttatgtgtgttcctggaaaggacgctctatttccctcgtgtctctacctggtaggtaaatcggccgcagaaaagaccaatgctaactccaccctgcatttgcagagatccgtcgctcacaccttttcttgtcttccgttgaaaaaagagaatcgtgggagtaggacctatttgccaatctcctggtaacactatcacaactggccacttccgcccaacgcccggtagtctgagag

SEQ ID NO: 195 - DNA, 401 bp, Artificial sequence
  /note="Description of artificial sequence: rs10897158"
gaagacttttttctagagggaggaaggggtggctatgggattgcctttcctgtttagggtaggtagatcgtttcccactcagggaagatactctccctatcctttggggccaggaggcttggaatatagaacagtcgaggccagctgctctcattcactggtcttttaacattttctttctttctgccatcgtatggacacgatttgaagtacagaatttcagccagcagcccatcaggctgacaccacacatattgcttctggtactttagccacaccagtgagaattggtggggcaagttgtcctgagaaaggctgtgtggcttttcttcagcacagacatttgggcaagcaactcagcataaggccagtgggtaccatcttctaaaccaggaccatca

SEQ ID NO: 196 - DNA, 401 bp, Artificial sequence
  /note="Description of artificial sequence: rs17702"
  misc_feature (122)..(122): n is a, c, g, or t
  misc_feature (199)..(200): n is a, c, g, or t
ctcctaagcagtgtgcccacaccactcctgcctgtggccctcattctgcctgctgtgcctttgaaggattcagctcaggaggctgggatcagcttcccttcgcagaaggagccataccaggntggaagtggggagttccacttcaacaaagccctgggccactgagggcggggagctgcagggagggcgggaggctttnnatacagcacgcacagctggctgcctcttttctttgagtacacttgggctgaggcaatgagcaagcacaactgcttcgcctgcagtgccctctcgtggcagacttgcctctagagatagcagccaggcaaagcctgcatgccagcgctgctgacaaatcacttttgaggctcagagctgaacaaaaaagtatgagaatgagt

SEQ ID NO: 197 - DNA, 401 bp, Artificial sequence
  /note="Description of artificial sequence: rs1377456"
  misc_feature (250)..(250): n is a, c, g, or t
  misc_feature (361)..(361): n is a, c, g, or t
  misc_feature (371)..(371): n is a, c, g, or t
gtagctattgagtcgaaaaagcagaatttagtatagctcagtctgcctccaaagctcttgaactttctactagaacacactgccttactgctggaaatttaatagaagtctctgtttgggaaagctgtggcaaatagatgtgacagttctgagacatgacctctgtgttacatggtgggtaggaatctgccaggtgcttcaccaagtgagtagatctgaacttgatcacccagtgaagcttctgtgaggnagcagcgcagtgcactggttacacatttaaatcctggctctgctgcttacctgctggatacatgaattgacctgagcctcagttgcctcatctataaaatggggatgacantgcttcctgnctcagctagttgatgagatgaaacacacaa

SEQ ID NO: 198 - DNA, 401 bp, Artificial sequence
  /note="Description of artificial sequence: rs11230701"
aaaaaaaaaaaaaaaaaaaaaagagctaggcatggtggcacacacctgtggtcccagctacttgggaagctgaggtgagcagattgcttgagccccatgggttgagcctgcagtgagcaataatcacacccctgcaccccagcctgtgcaacagaatgagaccgtgtctctaaaaaaacaaaagaaaaattggtatataaatggacgcatgcagttcaaacttactgttcaagagtcacatgtatttcaatacgctggtctgaacatgtcttccacttccttaaaacccttctatggctgctcattgctgttaagaaaatgaaaattcttaacacgacctacagtggcccactgcaaccttgacttcccagactcaagggatcctcccacctcagcctccc

SEQ ID NO: 199 - DNA, 401 bp, Artificial sequence
  /note="Description of artificial sequence: rs1006529"
  misc_feature (385)..(385): n is a, c, g, or t
aagaaatttatttgttcatgatccaattctttggtttcagcaaaacagatatatgtatgctcaaaagtttaacaaattgccactaaaattccacagttatgtctcttctttctttcccattcaagaaagcacatctgaatgcaaatcaaggggacattagtatgtgtataatcttaatactgctttaatttagaaaataaagtaaatcattgacagaattcaaccatctaactagtattaatatcaaattatttgcaatatgggctctctgccaaaatgatccttctcctttcctctatatctatgatccctctcaactcaaatattgaattatttgaagggtctatatttaatttttaagtaatgaacatgtactaaatggganaatttactattaataa

SEQ ID NO: 200 - DNA, 401 bp, Artificial sequence
  /note="Description of artificial sequence: rs1876334"
  misc_feature (217)..(217): n is a, c, g, or t
  misc_feature (329)..(329): n is a, c, g, or t
  misc_feature (382)..(382): n is a, c, g, or t
gttattgctgcagaaatccaggacactagagtagaaaaggttcctaacctccaggttacaagccaaccctggaagcctgtcctcactagaaataagagggtcatcggaagagcgagtgaccctctctccctcatgaggtggggcacctcttccttctgggctgtcacagctacagccttatcaatctacctaacaagggaatcctgcagaatggggncgagggcaatgccaaggacaagctcttctaactctattcctggattataatcaagcctctgaaattcatcctctagatgactgatggggccttgaggccatccagcccctancttttccatctctatggataagtctagagtaaatctgattgtggctaaacaanagataatgttcttcataga

SEQ ID NO: 201 - DNA, 401 bp, Artificial sequence
  /note="Description of artificial sequence: rs10822782"
ggagagatgactgaagtggaggaaggttcattagcctcacacaggaaatgccttgaagtagaccgtgggtgaatctgtttaagctgtgacccaagcagaaatactttcttctcaaagtgatttgaaactattattctcattgaatctatgataagaaaactaattatgataacagacatacggttggaagaggaaacacaggtagagctgtctttacattagagaaagaactgagagagctaggcaaaagccatcattgggggtaacagaacacagcagggggaagcattctgcagagcatattggaacaaagcaagtctctccaaaaaaatctaaagaaaatattttcagaaagtgcacaaggcaaagactaatggctccctgcagatattcataaggat

SEQ ID NO: 202 - DNA, 401 bp, Artificial sequence
  /note="Description of artificial sequence: rs10822783"
ctttgttagctcctcctcttcaacatgaattctaaatgtgtttgcttctatatcatattttctgctctaatataccctgtctatatgttattacatcctaagaaaaaaacaattcctatcataggtcaaacttatgctctaaattccaaaatcatatacccaatggctgatataatataactatgaaatgagcaaattcaatatctaaaggccactaaattggaatgagacttctacccgaaacagattcctccaagtcttccttaaatccataagttactttcacacacacacaatgccccaaaacaagaaaccccaaagccacatttgtttcccaatttccttcaatcccacattcattcccagcaatttcagtcaattttacctctaaaatatgtttt

SEQ ID NO: 203 - DNA, 401 bp, Artificial sequence
  /note="Description of artificial sequence: rs10997021"
ttctaaattcctgacccatagaatgtgagagcatgatacattgatggttgttttataccattatgtgtggagtaatttgttatgcagcaataataactggaacaaagagtgtgacaaggaatgtttatgtgttcatcagtcctatttcttcttaggcacagaggaagagggcattcaccagctcctttgcagtttattcaagtccttttgatggattttgtccaatgagatgtagaggaaagtacattgcattgaggtctggccaccaaacttcctattcaattatctactctctctcccatttctgcagtgacatggaggccagcttatacagatggcaaaatcacaagattgaaagatactgaatcattgagtcactaccttgtagagacctattcagg

SEQ ID NO: 204 - DNA, 401 bp, Artificial sequence
  /note="Description of artificial sequence: rs10822784"
  misc_feature (58)..(58): n is a, c, g, or t
  misc_feature (243)..(243): n is a, c, g, or t
  misc_feature (355)..(355): n is a, c, g, or t
cccattttacaaatgcaaatctgaagttaaaagactacatgacttacatagggttacnaagatattccaaagaatgggaatttccttgaagacggaggcaaacctaaaataagtttgtactctaagagttaaataagcaaaatccactggaagagattagctatttgtaaatgcattgtcaatgtgagtttttggtaaataggagtcgtgaatttaatcccaaaccattaattttagagacanaagaagatatataaaaatccctggttttattttaattttatattttttagtaaacagaccactatggaattgttaaaatgtattttacagccatttttaaggttacaaatantttttgttatgggatctttctatattttatgactttaattaaattt

SEQ ID NO: 205 - DNA, 401 bp, Artificial sequence
  /note="Description of artificial sequence: rs10762045"
  misc_feature (392)..(392): n is a, c, g, or t
tatgattttatctatttaaaattagctattttctgaggtgttggctatggagttgattattttttaatgaactttattaatatctaatttacatgcaactttaaatgcagtttgatgagttttggcaaacgtatcctccaatgtaaccacctcaaatgatcggttttcataaaagagtctgctgagaatttaagacagtgataaatcaatctgtaagtcaatctgggaataactgacatcttaatattgaatctccaacttcaggaatatgatcaatcccttcagatatttaggtgtttttaatttttttaatgttgtattataattttcagagtatagatattatatttgttttgttaaaattattaccgcttattttataattttggatnctgtgatat

SEQ ID NO: 206 - DNA, 401 bp, Artificial sequence
  /note="Description of artificial sequence: rs10997032"
gaatctctctagcagtgattacagtcagataaaggaccaatataatttaatgttttattagttatttagttgaagaagctaagactctacatttcatgtttctgattgatactaacttgataaattcaacaaccaaaccagaaaacaatctgataaatcatatgaagaatcatatacagtgtaataggattaggacttaaaaacaagaacagaacaaatcaaaataaaggatgcatacataggcatacaagataaaaaaaaggaaaaggaagtcaacctctatccaataaatataatgtttaaatggaaaaaaatataggctaatagcagttggctatattggtagaaataacataagaacaagtcttctaatttatttgacattggacaggcactaattt

SEQ ID NO: 207 - DNA, 401 bp, Artificial sequence
  /note="Description of artificial sequence: rs12763572"
  misc_feature (48)..(48): n is a, c, g, or t
  misc_feature (86)..(86): n is a, c, g, or t
ggtacagggccacattttctaatcacttagaaatagttgtaggttgcncacaagtatttatcctgaggtttctctttgatatggtnattggtttgctttcaggttttcccaagcctcagtgtactagattctttgtcttgacacctttagactttgtcttacaagctcttccacagcatcctgctgccctgccagactccataatatttattggcccttttctttacaaggtccacaaatgacttatggactgctcagtatagccagtgacattcaggcctatcagatattaatactactgatgctccactcatatattctcagcacttctatatccatcttacagacttactaacagttaagtccagaggcttaaaaattgaattctattcatacttaaa

SEQ ID NO: 208 - DNA, 401 bp, Artificial sequence
  /note="Description of artificial sequence: rs10822791"
  misc_feature (74)..(74): n is a, c, g, or t
  misc_feature (99)..(99): n is a, c, g, or t
tcatagtgaggaagcctcttgcccatatgaagatgtcgggtaaaaagattaatttttagaagaaataattatanacctggaagatagaaatattttgantggtataaaaatatcaataaatgttatttttctacatttaagttgtatctgcttgtatggcataccatctcttgcaattctgcctgccatgttattgatatgaggaaattttgatgatatacatgggcactctttttatctggtcctttctttcctctagctgccaaaatgtatcacttataccctacttctgagccaccatatctgctgacattatccactgtgctcctattctctgtctattctctaggcacattgtctaataaaaggtggctactagctgcatatagctattaaaaatt

SEQ ID NO: 209 - DNA, 401 bp, Artificial sequence
  /note="Description of artificial sequence: rs10762046"
tctctgaaccctaaatctgcactgctttcttttgataagtaaagtccatggggtttctgaattgctgctctcctgggggaattcatgataattttctgacaatgcagttaacagacctacacagccaagttctcctaggccttgagcttctgtctggtagtagcccaaaaatatttcatcccttcttaatccttgataaacttattatgtgcatttgaaagtaggtgaggatacattattatggaattaaataggtcagaaaagaattcagactcattacaataatgatctaaaaatgatatcaccaaattgttttctaccattaataaagcccagattaaaatatttctaattataccattacctttgaaaattactggtggtaaagaaatttgcctttg

SEQ ID NO: 210 - DNA, 401 bp, Artificial sequence
  /note="Description of artificial sequence: rs10822792"
  misc_feature (1)..(1): n is a, c, g, or t
  misc_feature (21)..(21): n is a, c, g, or t
  misc_feature (101)..(101): n is a, c, g, or t
ntgacctttgttcttttatgnactactttataaattttatttattttaaattgttaataaattttatttttttaaattgcttggttttctttgcatttctnagtaagaattctcaaatgtttaaattatcaatactatttttatttatgttatgttaattaactgggagagaattaatagtagaaagtggcattaagcatatgaataagaagttcgtgcaactgttttggttcatgcaaatagaatcatactgcatatactttttgtatcaactttcactaaacattaaatttttttctatgtaagttgtatatggaattattcattctcattgctgtatagcatgtcattatactaaaatgtatttatccagtctatggttgatgggcatttgcataatg

SEQ ID NO: 211 - DNA, 401 bp, Artificial sequence
  /note="Description of artificial sequence: rs10997035"
  misc_feature (213)..(213): n is a, c, g, or t
  misc_feature (275)..(275): n is a, c, g, or t
  misc_feature (395)..(395): n is a, c, g, or t
gtctttacaaatgatgttaagaaaatgcaaaagcattcttcataagactatttattttttacaatatcagattatcgtctgcagagagttaaagtactagagttttgatttgcacctacctgatatgacatacagaaataggtcttgatttgaattctagagagaaagtcaatgcataaatgaataaatgatctcaacatagcttttgacagnagtgagtcacaaattattcgaaattgatgtcaacagtgagttacttcttgtaggatggtcantcaggtttatcaggcaaaagaacttccaacacttgttttagaaacaaaaatgctaatgatgtaaattgatattctcttgtgaaaatgaaagtgacttgtatcagctgcattttattcctnagacag

SEQ ID NO: 212 - DNA, 401 bp, Artificial sequence
  /note="Description of artificial sequence: rs10997037"
tacacatatatatcatttatgtgtaaacacatatgtttcgtatcatcagtttctcccaccaaatttactcttctctctcctcatgtatctcccactctccatgttcaatcaatcaatcactatgtcctgctgattcggcctctcaaatatgtttctggcacatagtagatgctcagtaattatgcactgagtgaatatgcctacctagcacaagttctatcaattcaatgatctaacttctatgcatcataactcacccagttttacaagtaaaacatataatgattgtcttttaattaatgcacctactaactttatcattaaggtcaaaggagttatcattaagttatcattgaatcagttgctgtgaatttcgtgtaggtctctctcaatggaaaagt

SEQ ID NO: 213 - DNA, 401 bp, Artificial sequence
  /note="Description of artificial sequence: rs10822794"
  misc_feature (73)..(73): n is a, c, g, or t
  misc_feature (81)..(81): n is a, c, g, or t
  misc_feature (144)..(144): n is a, c, g, or t
  misc_feature (165)..(165): n is a, c, g, or t
  misc_feature (215)..(215): n is a, c, g, or t
gattgttaacgagaatctttggaatagttgcatataatctaatagtgattgtctaatcatcatgttttaaatnaatcatcnctatcaagaggacatatttaaatttactttttctaaagcctatttccttgcagcatgttgganatagagttttatcatccggtnataattaatttgtctgagaagttgttttaacagtggttttcaactctgtnccaatgagagtgtctcaggaagcactgtgggtagagagagaagaaggagggggtgaggagaagccctactgaaaatagtgtgagttcccacactcaatcgctgttacaaagacagcagcactttttcatctgttctatatatttaagttcagtttcactggaataaaaggttgtgtaatactaaaa

SEQ ID NO: 214 - DNA, 401 bp, Artificial sequence
  /note="Description of artificial sequence: rs10762051"
gtataaaatagaaaagctgaaacaggaagacaagttaggaggttttagagtaggctagaagaaaagagttcataaagatctgaatgaggatgttggcagtggaaatgaacaggttgggacatttggtactgagatagaaacttcacgattttattgctgattagatgcagggaggtaatgcaaaggaagaattccaagatgactaaggtattgactaatcctgatgtctagaagaaagtgggcaaactattatcagtaataaaagagccaaaaggaaaggaagtctcgatgggttaataagagtctattcacgttgagtttcaggtaagtttcaagtccagatacctattagacagtcaggacagagagagagagagagagagagagagagggatttggta

SEQ ID NO: 215 - DNA, 401 bp, Artificial sequence
  /note="Description of artificial sequence: rs12357109"
  misc_feature (135)..(135): n is a, c, g, or t
aggaacttggtagtcataattaaatgtgtctctgttgatagcttcacagacttttaagacaagaggggattcatccttttggtgacacctgtcatgttacaggaatacctgtattgtatgtgaaaggactgtggnactcaaaattactgttcaaatgtaagatggaaatatttattgacattattattacattgtaatagagacttaacctaagacttgtcttttttttagaatttgttaatgaaactgcatttatctaatgcactataagagcaatatcttactgaaacattctaagcgtaggttaagaaatgcataatcgttggcttggtaatctctttctgggcaataacagcagaaccaacctccagcaaagaaagcttagtagcagagatcctatc

SEQ ID NO: 216 - DNA, 401 bp, Artificial sequence; identical to SEQ ID NO: 56
  /note="Description of artificial sequence: rs10997044"

SEQ ID NO: 217 - DNA, 401 bp, Artificial sequence
  /note="Description of artificial sequence: rs10997048"
  misc_feature (220)..(220): n is a, c, g, or t
ttaaatttagaataattaagatgcacagtaaaataatagagacagacatatagtctattggaacaaaagacaaatttttacacagacaatgcatttatacttgattatgtatctggctctgcacatcattatgggtaaaaaaacttttttatttaaacaattattattaaaaagtttttatataattggttaggcatatgaagtgaataaaaataaaagncttatctcaatatacaaaaaaatacaaatggttaagatcttaaatgagaaaggcaaatttatttatttatttagagacggagtctcactctgtcacccaggctgtagtgtagtggcgcgatctcagctcactgcaacctcctgtccccgggttcaagcgatttgccaccacgcctggctaa

SEQ ID NO: 218 - DNA, 401 bp, Artificial sequence
  /note="Description of artificial sequence: rs10822801"
  misc_feature (120)..(120): n is a, c, g, or t
  misc_feature (142)..(142): n is a, c, g, or t
agagcaattatcaatgacaactctgatactgatgctacagattcagagaggattgtcttattcttaaaaagggaaaatgtatataaagcccttgttacaatggtggacacatagttaagnacttaataaaggcaaattctcnctctcttatcccttgcactttgcctcacttatcaattccatgcagctgattattctgggctataaatctaaagtctcagcaagaatgttgagtgaacagtatccaaagtcacatagcggcttttcctatcctgacccaactaaatgtattttgcaaatatgtcacttattaattattactacacaaagattatcacataatcccacattccaagcaaataataaaaaactgtcacatacctaaagggttagaaaaaaat

SEQ ID NO: 219 - DNA, 401 bp, Artificial sequence
  /note="Description of artificial sequence: rs185750"
gcatgttctggaatgacatggtccctgtcagggaagttcaggcagggaagagggtgtttaaagggtgtctgggaaaagtgagtggaaaataaggctggaaggggaaactggccagagaatggaaagttgggaatgtcattgcgtgggcgaatgtgtgctggtggtaacagaaagtcgtctgtagctttggaacaatggtgcgacgtgtccacacgtctttaaaaagcaaacacttaaaggcaaagggaggaaggaatagcagctgaggagggaagctcagaaaggaaatccaagttgaaatatccatgcggtagtagcatgagaaggattctaaggaagtggagtgaggacggggatgcggagccaaaggttagaaacttcttagagggagggcgaccttg

SEQ ID NO: 220 - DNA, 401 bp, Artificial sequence
  /note="Description of artificial sequence: rs12456117"
  misc_feature (3)..(3): n is a, c, g, or t
  misc_feature (120)..(120): n is a, c, g, or t
  misc_feature (389)..(389): n is a, c, g, or t
aantccagtgtctggtgtccttataagaagaaggaagtttgagcacagcgacctatggggagccgcagtgtgaggatggaggcggacattgcagggaggcaggggccgacagggagcacngtggcgccaggagctggaggaggcaggaaggaccccgagcctccacagggagcacagctgcccacaccttgatctcggatatgtggcctcggtgaaggaccccaatctgtcacagggagcatggctgcccataccttgatcacgtggcctccagaattaggagagaacaaacacctgtcgttttcagctccagtttgtggcactttgctacagcagcccggggacactcctactgtccaaaaggataagcacatttcaatcaagcaganctggggcctgag

SEQ ID NO: 221 - DNA, 401 bp, Artificial sequence; identical to SEQ ID NO: 71
  /note="Description of artificial sequence: rs10490832"

SEQ ID NO: 222 - DNA, 401 bp, Artificial sequence
  /note="Description of artificial sequence: rs1809043"
  misc_feature (208)..(208): n is a, c, g, or t
  misc_feature (216)..(216): n is a, c, g, or t
taaaagtcatcaaataatcatctacattgtattaagcagttgcatgaaaaaaggagaaaaacatcagcaggagagtcatgtcagctgcttttaaacagacatatgtcaccatttcatagccatccagataatgaactggaattttctgtgattattcagttagctgatcatcttatggctcaagtctgagtttctaataggaagatanactttcanttgaaaatatctgatctcttaagccaaataaaaattatctaattcttaatgttgactttatgagaagaaatattaaaatggtgattaagaacaattaagtaaaactggaaaaaaaaaaaaaggcctggtacggtggctcacgcctgtaatcccagcactttgggaggccaaggcaagtggccatc

SEQ ID NO: 223 - DNA, 401 bp, Artificial sequence; identical to SEQ ID NO: 72
  /note="Description of artificial sequence: rs1545384"
  misc_feature (74)..(74): n is a, c, g, or t
  misc_feature (401)..(401): n is a, c, g, or t

SEQ ID NO: 224 - DNA, 401 bp, Artificial sequence
  /note="Description of artificial sequence: rs12605690"
  misc_feature (384)..(384): n is a, c, g, or t
ttcatttctttgcttatggacatccagttgttccagaaccatttgttaaaaagactcttttctccactgtattccctttgctcacttgtgaaagatcagccgactgtatctttgtgggtctgtttcatcaatccatttgtctttctttcaccagtacctcagtgtcttaattactgtcgctttagttaagtcttgaggtcaggtactgtccatcctccagcttctttcttctccttcagtattttgttgggtattcggggtcattgcctctccatataaactttaaagtcagtttgtcagtatccacaagataacttgctaggattttgattaggattgcattgaatgtgtagatcaaattgggaagaactgacaccttgaaanacttgattcttcctatc

SEQ ID NO: 225 - DNA, 401 bp, Artificial sequence
  /note="Description of artificial sequence: rs10139321"
  misc_feature (385)..(385): n is a, c, g, or t
acagattagatcagataaaatgcatggctaagacattgctggtgatttcactgaaaaagagaatgacaagcagctggacttgcttaaaatacagattcccaggctctctctaatcatttaaaattattagattgtggaagtatcttgggaattcaaatctttataaccactcttaagtgactctaacacatttggtccacacagcacactcttgggggagggaggcattttatgaacatcatgatggtgaaagactggatacaatatatggacacagaactatgcagagacttcatggtttgctcaggatccatcgagaattattttagcagtgaagtgacacccttcctataaggctgtggttaccaaccccaactgcatatgnaaatgatctgtaagaa

SEQ ID NO: 226 - DNA, 401 bp, Artificial sequence
  /note="Description of artificial sequence: rs10132490"
  misc_feature (243)..(243): n is a, c, g, or t
  misc_feature (251)..(251): n is a, c, g, or t
  misc_feature (348)..(348): n is a, c, g, or t
cacttgtgcagttgcagatgggagcagctggccttgatgatttcatgatgaccttctttatatccctacatgcctggcattgatgctggctattggctggggcttcttaatttcttccttgtagcttgtcatcctccaggggtctagacaaacattctgacagatgcaatctgggttccaagtgaggaaaagtaaggccacccattctcttaagacctggtttctggaactcacacttcatcncttctgcngtattctgatggtcaaagcaaatcataaagccagttcagattcaactggagaggaaataatctccaagttttgaatgaagaatatgcaaacaagtanaaaaatgaaaagaatttttctttccaattatgacatatatatttaagatccat

SEQ ID NO: 227 - DNA, 401 bp, Artificial sequence
  /note="Description of artificial sequence: rs10143458"
  misc_feature (54)..(54): n is a, c, g, or t
  misc_feature (96)..(96): n is a, c, g, or t
  misc_feature (104)..(104): n is a, c, g, or t
acaaacattctgacagatgcaatctgggttccaagtgaggaaaagtaaggccanccattctcttaagacctggtttctggaactcacacttcatcncttctgcngtattctgatggtcaaagcaaatcataaagccagttcagattcaactggagaggaaataatctccaagttttgaatgaagaatatgcaaacaagtaaaaaaatgaaaagaatttttctttccaattatgacatatatatttaagatccattcaataactctaaaaaacaagtaattttagctttaacataattagtgggaaaaacaataacagtgcagcattcaaattctctaaattaatatccacctatctatctatttttgtttccacccacgatggtgattctctgaagagaat

SEQ ID NO: 228 - DNA, 401 bp, Artificial sequence
  /note="Description of artificial sequence: rs11159605"
  misc_feature (204)..(204): n is a, c, g, or t
attctggaagagacaaactatagctatagtaagaatatcagtggttgccagaggttcctagtgatagagtagtatttaatgaataaagcataagggactttttcaggatggtgaaactattaaatatgatactatagtggtagatatatgacactatacatttatcaaaatgcatagaattttacaacacatagagtaaacttnaatctgtgtaattaaaaaaatcatttaggaggttggcagggtgtcctgggatagaatacagaatgtgataaaacaatctacaaatgtatacagttaacaaatgtataaaacaaattcactgacagttgtgggtggttctaaatttgctgacctaagtaactctgaaaatgattagaactggaaataaaagtaaaggc

SEQ ID NO: 229 - DNA, 401 bp, Artificial sequence
  /note="Description of artificial sequence: rs10132081"
  misc_feature (145)..(145): n is a, c, g, or t
  misc_feature (305)..(305): n is a, c, g, or t
  misc_feature (397)..(397): n is a, c, g, or t
aagattgtacatactcttggatagagatctgtgttccttactttaagaatttatcaaaatgatttttaaaatttcatttatttgaaaacgttaaacaaacatgagctgcatgacaccatatggtgaatgaaagcaccataataantatcactaaacatatcattccaagtcccactggaaataggtcaagtcaatatcttctacaccagcttatgatgttgttcatcctttcctttattatgtactcagtttcccaatctctggcttggaaccatctcttggttcatttacacatcaaagattangatgataaattgcttgtaagaagttattttttgtattttgtggtatattattttctttgtctttgctcaatcgaagctctttctgaagatantatt

SEQ ID NO: 230 - DNA, 401 bp, Artificial sequence
  /note="Description of artificial sequence: rs10132130"
  misc_feature (5)..(5): n is a, c, g, or t
  misc_feature (109)..(109): n is a, c, g, or t
tcttntacaccagcttatgatgttgttcatcctttcctttattatgtactcagtttcccaatctctggcttggaaccatctcttggttcatttacacatcaaagattangatgataaattgcttgtaagaagttattttttgtattttgtggtatattattttctttgtctttgctcaatcgaagctctttctgaagatactatttgtgtttactagggaactctctttttttcctctaatactgcagcattttctgaaatattactctttaaatctcatctataactgattcaccccatccttctatcaatctctttttcatggaacactagtattagaaaacacaaattatggtagaggtctatgggtagtaaaaactcttatatttatctttctacta

SEQ ID NO: 231 - DNA, 401 bp, Artificial sequence
  /note="Description of artificial sequence: rs10147226"
  misc_feature (308)..(308): n is a, c, g, or t
ttactagggaactctctttttttcctctaatactgcagcattttctgaaatattactctttaaatctcatctataactgattcaccccatccttctatcaatctctttttcatggaacactagtattagaaaacacaaattatggtagaggtctatgggtagtaaaaactcttatatttatctttctactagtacattttattacctgaattggagagaaattaggacagtcaacaatgggaatggggtatgctttaatgagaaggagggcttgtgttagctctgatcagattcctactgatcccaangcgaaatcctgggtttgagagaggtagcatgttgatggattttcctgacacacattaaaatgtcaactgtcaggaggtggaaaacagaagtta

SEQ ID NO: 232 - DNA, 401 bp, Artificial sequence
  /note="Description of artificial sequence: rs10873350"
  misc_feature (344)..(345): n is a, c, g, or t
  misc_feature (385)..(385): n is a, c, g, or t
taacaagttgtcttgtctgtgacttgatgtttccatctggtttgtgcaaggaatgttcagataatacagtaaagaggaagattatgatttccaggggaacagccataatgggtcactatcttcctgggcctgataagtttaatccaagttgcctgggaggaaagaactcataaaatactttatctgaagtaagtgcaaaaatactcataaactcaaaggttaatcactgcaccagaagaacagatgaaggagacaggacaattttatgtttctttactgtgctacccttattaatcatgttgtgggttgctttaaaatatgtgcctgctctttatttttaaagnntaatggatagacagacagacactgaaaatgaagttggaangataataacaggatct

SEQ ID NO: 233 - DNA, 401 bp, Artificial sequence
  /note="Description of artificial sequence: rs10140080"
gctcaattttttctccaccagccagtatttacaggagttacaatcaaggttaagaaacacatttatttttctttttaatctattttctttacatgccatattttcttcttattatgtgttttacttgatttaaaattcaaaacttgtatttatactgagctacagaatgaataatgaagaaaacttcattcatctttctacacaagtagttttattttatgatgacaaggtagatagcaagatcatctgtgtaatgatgcctccagatttcactaaacaatacgtaagtggattcgagaattatgctaatagttactgttgagaaatcctcatataggctcaatttctgcctctagattcatgcagaacatctttggacaagtgacagcataaaagatttc

SEQ ID NO: 234 - DNA, 401 bp, Artificial sequence
  /note="Description of artificial sequence: rs12431659"
  misc_feature (231)..(231): n is a, c, g, or t
aaagcattcaatctgcctttcaggatggagagagaggtggcctcagtacctgataaagcagcagcattggaacaaagggcttctcgttgtttcccctgtgttttttattcagtgtgcagagtgggctagcacttcatgaaggcaacaatgttggagtttagcagcagctgctccactgatgaagcacttgacgtccagttcacaaaattcctttcatagtctattcaggcntctattaaaaaacatacctagcctggataatttctaaacaacagaaatttactgcttatagttctgaatgctgggaagtctaagatcaaggcaccagcagattctatgtccggtgagggcttactctctccttcgaagatgggccttctgtgtccttacaaggagaaagg

SEQ ID NO: 235 - DNA, 401 bp, Artificial sequence
  /note="Description of artificial sequence: rs12434622"
  misc_feature (171)..(171): n is a, c, g, or t
  misc_feature (373)..(373): n is a, c, g, or t
agagaggtggcctcagtacctgataaagcagcagcattggaacaaagggcttctcgttgtttcccctgtgttttttattcagtgtgcagagtgggctagcacttcatgaaggcaacaatgttggagtttagcagcagctgctccactgatgaagcacttgacgtccagttnacaaaattcctttcatagtctattcaggcgtctattaaaaaacatacctagcctggataatttctaaacaacagaaatttactgcttatagttctgaatgctgggaagtctaagatcaaggcaccagcagattctatgtccggtgagggcttactctctccttcgaagatgggccttctgtgtccttacaaggagaaagggngaacaagctccctgggtcccttttaatc

SEQ ID NO: 236 - DNA, 401 bp, Artificial sequence
  /note="Description of artificial sequence: rs10141403"
  misc_feature (38)..(38): n is a, c, g, or t
  misc_feature (135)..(136): n is a, c, g, or t
  misc_feature (147)..(147): n is a, c, g, or t
  misc_feature (388)..(388): n is a, c, g, or t
gaagatgggccttctgtgtccttacaaggagaaagggngaacaagctccctgggtcccttttaatcagggcagaaccctcataacccaattgcctcccaaagaccctacttcttttttttttttttttttttttnnttttgagatcngagtctcactctgtcaccaggctagagtgcagtggggcgatcttggcttaccgcaattaccgcaacctctgcctccctggttcaagtgattctactgcctcagcctccccagtagctgggactacaggcacgcaccaccatgctcagctaatttttgtatttttagtagagacgggctttcaccatgttggccaggatggtctcgatctcttcacctcgtgatccgcctgccttggccttncaaagtgctggaa

SEQ ID NO: 237 - DNA, 401 bp, Artificial sequence
  /note="Description of artificial sequence: rs10747302"
gctgatttttgagctttatgcatatgaaatcgtacaatatgtacaattttgtgtttggcttctttcactggagattctgtgtgtgagattcatctatgttgtgtacagttgccctttattcattctcagtgctgcatattccaggctgtgtatgcagcacactttacctttcctcctgatcatcgtagtcttcagtttggcctattatggataatgctgctgtaaatataattttaatttcattttttatttgttgttgcacacctaagtgcactaaaagacatggagtagaatataccataaggtccagtcagtgaagttgttaagtcaagaaaaaaaagagactcataaggatctgaaaggaaaaaataaaactgacacaattcacaaaaggcataagg

SEQ ID NO: 238 - DNA, 401 bp, Artificial sequence
  /note="Description of artificial sequence: rs11159610"
  misc_feature (237)..(237): n is a, c, g, or t
atttttaaagtgaaatgtatagaacattgcaacaaacaacatatgaatgaacgcacattctttcagggatatatggaatattttcaaatgtagagcttttacgtggcaaaaaaaatatgaaatccaatttcaatattatagagcccacattctctgaacatgacacaattaagttagaaataagtactttaaaaattcaaaatctatgtttaaataactcatgagacaaatgaaaanaacaatggaagtgagaaatgcttagacatgattaaaatttaaactacctaaaaatataagtacaggtgagtataagaagtatttagaggaaaatatatatccttaaagtatggtatttaaaaaggttatgtctaaaaaagacccaaacattcaacttaaaaatc

SEQ ID NO: 239 - DNA, 401 bp, Artificial sequence
  /note="Description of artificial sequence: rs11159611"
  misc_feature (165)..(165): n is a, c, g, or t
caacatatgaatgaacgcacattctttcagggatatatggaatattttcaaatgtagagcttttacgtggcaaaaaaaatatgaaatccaatttcaatattatagagcccacattctctgaacatgacacaattaagttagaaataagtactttaaaaattcaanatctatgtttaaataactcatgagacaaatgaaaaaaacaatggaagtgagaaatgcttagacatgattaaaatttaaactacctaaaaatataagtacaggtgagtataagaagtatttagaggaaaatatatatccttaaagtatggtatttaaaaaggttatgtctaaaaaagacccaaacattcaacttaaaaatcacataaataaatcaataagtaaatacactgaggaag

SEQ ID NO: 240 - DNA, 401 bp, Artificial sequence
  /note="Description of artificial sequence: rs10132137"
  misc_feature (238)..(238): n is a, c, g, or t
  misc_feature (257)..(257): n is a, c, g, or t
  misc_feature (398)..(398): n is a, c, g, or t
ccgtgaaggcaaagatggtggctgtccatttgtaaaacttcctccagggtatgcaggcatgtctctgtgataacggtgtttctcaccagtgattaatgctataaaagattttttgttggcatacatcccaagaaatatggttgataaactggcaagatcagcagattgcggcccaaaatctccctttactttttttgaaaactctctttactcttttgaaattcctatcacttttctngtatgtaaaccaaagtttntttctcaactaacttctgaaatcttaacttaatctcattcacttccttgcattgtgttatagaccacttagaagtacttttattatttaaccttagatatattatattttctaattccttctttcaaagattattaaagtnaga

SEQ ID NO: 241 - DNA, 401 bp, Artificial sequence
  /note="Description of artificial sequence: rs10135095"
aagttatttcccatccatgctagcattaaaagttcttatccagttccacagttttaagtactgtttatatgtcaattgttcccaaacgcctacctccagccctgacttactttctgacttcagattcataaatctgtctatttggcatatccatatggttatctaataaagatgtcaaattttacatttgatttcattggctccaaaacttactctctcagttgtccccgtcttagtaagtctatccagttactgaagctaaaactgtcagggtacttttgagtcttgtgtgacctacagcttctactaataatccatcactaagtcctgaaagctttatatttagagataaagtacatgtcatctggagtcaggatgactcagttgaagtcttggctcca

SEQ ID NO: 242 - DNA, 401 bp, Artificial sequence
  /note="Description of artificial sequence: rs10147836"
  misc_feature (33)..(33): n is a, c, g, or t
  misc_feature (107)..(107): n is a, c, g, or t
  misc_feature (152)..(152): n is a, c, g, or t
agcctagcatgtcttgaaaatgactcttcactnctaaactctgggcacaaaaggtactggataatagtcaatgccaatgatcacatatttgttcacttatgtgaatncatagccttcacattgtcctcttttcactctacaaccacctttgnacttctgagatgtgtagcatagttcttgcaattggaaataattggaatatggggtagataaatgcacatgtatcagcagagtgagaaatggtcatgagcagtataaaaatagcacttatcactaatggaacataaaaatgtcattccctgggtagcaacttttctgctaaaattgctctggggaggtagaagcaactgcaatttcctctgacctccacggtggtccaaatttctctggttgaaataatc

SEQ ID NO: 243 - DNA, 401 bp, Artificial sequence
  /note="Description of artificial sequence: rs10139812"
atttctctggttgaaataatccattgcaaatgactgatcatgaaatctgaaaaaataacttgtgtagcagttaatattcctcctcaataggataaattgatcaattgtaaatgtacatgtatttcaggaacttacttgacaatagctcatgggttttgatgttaattatatttattcttgctcacaactcatttattttcccttatttagaaagatataaatacatggtgatatttagaaaggtacaatcatttctgctaatagaaaaaatgaattttatattttagattcagtctaatctactacaagattccttttttttatcccctctgcagtctcaggtgaaagccagctcacatccttgaaaaaaatatttacatgatttctttagaatttatttt

SEQ ID NO: 244 - DNA, 401 bp, Artificial sequence
  /note="Description of artificial sequence: rs10143348"
  misc_feature (62)..(62): n is a, c, g, or t
cagtcaggttgattttaaatgacctcactagctaatagacacatttattcttatcaactgtncaatacaggaaaaggaattcactgttgaccttctatttagaaaaatatatatattttaaagaggatttgaacaaaataaatatatactccacattcacaacaaaagtaaacagactgtcttttcacaggatgtgaaaccgtcaagaaaatagtcttttatcatcctctattttcttgttttgtttttactagcaatgttttttaaatttattctccatgttttttaaatttattctctgagataatccaaaaccctatgcacaaaatgaattaaaagtgtataagagcaaatgacatatttttctactcggctcaactgagcaagatactgcctgatag

SEQ ID NO: 245 - DNA, 401 bp, Artificial sequence
  /note="Description of artificial sequence: rs10130591"
  misc_feature (177)..(177): n is a, c, g, or t
aattgtgtttattttgattggaaagcaatgcaaaaaccaatttgcttgaaataaaaatatatatgttcatgtgtatatacatatatatgtatgtgtgtatatatatagctgagagaaaatatcatatatatatctaagaaaatctttgtactattatataacagtcagcacttatantcagcaggttaactacaacaaaactgttgggaaaataatcttctatcacaaatactgttccaactttaaatgaatatgaaaagtttttcatagaaatatcctaagacatttaatattctaaaatatatttcaattgataaatcaataacctttgaaattatttaaatacattttttatttttataggaaagacattgcacatttaagaaaccatctagaaactc

SEQ ID NO: 246 - DNA, 401 bp, Artificial sequence
  /note="Description of artificial sequence: rs12894765"
  misc_feature (374)..(374): n is a, c, g, or t
aaacaattcaaaatgaaacaatgatgacaaaccactacagtccaaacattttggcagtggaaaatccactatatattttaaaacatcacagtaaaatttataggtgagtaaaggaatacatagataatgtgagaaaagaaatcttccaggtttgaggattatatgtgttgagtataatccatcaacaggatgtgacggcaacacgagataatcaataggaagttactataataattaatatacctagcaaaaagctgttaaatgaatataaaagaatttgtaggaataaattaagattttatgagtcagagattgtttcgaaaacatcagctttgtcctctatattcagaaaaatgtgcatgtataacatgatngtggcaatcctgtatacaacacaagga

SEQ ID NO: 247 - DNA, 401 bp, Artificial sequence
  /note="Description of artificial sequence: rs12882544"
cttgtaaacacactccaggagacatgtaggagaatactgaatgtttatgatagtctaaatttgaaaatgacccaaatgtttaatgacaatagaagagataaataaaatgtgatatattctctgtatagtactttatacaaccagaaaaatgaataaacagcagctacacacaacacgtggattttatcttgcaaacataaagttgatcaaaagaagagaggcacaaaacaataagtactgttattgttcagtcatgcatactcattggcaaaagtattgagaaaaatgagagggggaaatagaatttaaaaattggtagggagggaagggttatgatgtggaaggataggtaaagctttgaggatgccaacaatattctatttcttctcaagggagattgt

SEQ ID NO: 248 - DNA, 401 bp, Artificial sequence
  /note="Description of artificial sequence: rs12142266"
  misc_feature (293)..(293): n is a, c, g, or t
tctctccaccaaaaggaaccaggcctccttggagaaatggctgattccaggattggggcagggaaattacaagatgagtctagactatctatctttttatggccaaaaataaggaggtgttcaagcaagatgaggacatgttaaaaggacacaaaaggcagcttgaaggggctcccactggtcaaatctgcaacaattcacacatcaaaaaatgccagtagtaataaagcataatctattgaactaaataagaaacccatgagtccacattggtataaataaatgaattattncataaagggggaggagagaaacttcctttgtgtattagaaagcctactaataaatgtaaaaggagttatagagttagaaaatcaccatttggcatcagtaataattat

SEQ ID NO: 249 - DNA, 401 bp, Artificial sequence
  /note="Description of artificial sequence: rs17017774"
  misc_feature (114)..(114): n is a, c, g, or t
  misc_feature (220)..(220): n is a, c, g, or t
agtatattgttatgaataagaattccatttacaaatgatttcaattcatacactgaattccacagacatttcctgctattattttacttttactctcaaaatacagagaatctnggaacctgccaagttatagaattaaaaagccttaattatctactgggtgtaagaaatttatgtaatggtaacaacacataatgatgatgaattctgcttctcttantgactcactctctcctacccctccttctccccacgcaagttaagtaatattagacaaacctgactattgtttcttcacagcagttagtccttactcagatgattaatttctgtgaatctagaactgttttcaatactttgggaaatactatacacaaaaacaggaatggagaaggataagc

SEQ ID NO: 250 - DNA, 401 bp, Artificial sequence
  /note="Description of artificial sequence: rs1377917"
  misc_feature (153)..(153): n is a, c, g, or t
  misc_feature (174)..(174): n is a, c, g, or t
  misc_feature (240)..(240): n is a, c, g, or t
ggcatgatagggaagtggatcatgtccctgcctgcttaggacaaggagctagtgcaccatccccttgtcccctcccctgagatctcaatacacccaacaggatctctgcctgccatatcccacttggtcagggcaggtgcttccactcatcancaacctacttgagggcaaganagatgttactcttaatcaccatctaccggactggatcctgaactgtacaaccaaattaaaaacctnctgccagaagggctcactgctagtccataaaataagcttcctgagtccttcctcctcaccctaagccttgcaggaggcatatgtctaacacatcactacaacaagcagcatctgaaaaagccagaagctagccccaaataaggaacccaaacagagcactg

SEQ ID NO: 251 - DNA, 401 bp, Artificial sequence; identical to SEQ ID NO: 82
  /note="Description of artificial sequence: rs1454333"

SEQ ID NO: 252 - DNA, 401 bp, Artificial sequence
  /note="Description of artificial sequence: rs1475449"
  misc_feature (200)..(200): n is a, c, g, or t
aatgttgctatatgttatagctttccctgcatgaacagacactgactactggagtgcccttactctagtcagaatgaggtttattctatggagacattgaacttagagaggttgcatacattggaacaccatgcacagctgggggtggagtcagtctcacaatacacagtgagatatcccatcaattacttccgatagcnctggcagactggcctataactgtcccctcatgcatctctacacagattagtgaaagctaattttctggagaaactggctccagaggaaagagatggtgacatttgaagagtcaggtcacatttgaaaatctgttcactctgcagtgaaaccctttggttgacaagctgcagccctcgtgcatagtgttcctaggctgttta

SEQ ID NO: 253 - DNA, 401 bp, Artificial sequence
  /note="Description of artificial sequence: rs10991949"
ggctagtcttgaactctgtgacctcaggtgatctgcccatctcagcctccaaagtgctgggattacaggtgtgagccaccatgcccagcctcctaactgaacgttttaaaaagagacaaataagttggactctagagtatggtgaagaacttctgcacatgtatataggtaatggggcagaaaggactgcgtcatcacccaaaaggcgcacatgtcagcagcagagtatgggtctatgcagataagaccatcgactgcctatccacataaggttatgaagcatgggcttccacaacatccctggctagaagacttgttgcccaacttccagttcctggtctcttcccttatcatctccctcaacagtctgctcaacagtctgcacctgttgagttctctcc

SEQ ID NO: 254 - DNA, 401 bp, Artificial sequence
  /note="Description of artificial sequence: rs1412466"
  misc_feature (270)..(270): n is a, c, g, or t
  misc_feature (344)..(344): n is a, c, g, or t
gcaggaaaatgagcaattcatagaaactgcctctaatgaggcccagatgctgaacttcacagacaaggaatgtgagaagctataaacagaaaaaatgggatcagagacccataaacagaaaaaatgaagagagcttcagagacccttgggacacaagaaatgcatgcacttgtgcgctctctctctttttcatttttattcttctaatttatatggctggctttctatgggtcactttgtatcagtataccttagttgttagccagtganggtcaggggttatgatcaaacaccttaaatgagtaaggcttcctttctttgccaataggtctgtctgtgggctngggaactcatttcaagttctgctcatttacaaatttgtcctggctcttactttccac

SEQ ID NO: 255 - DNA, 401 bp, Artificial sequence
  /note="Description of artificial sequence: rs16907585"
gggtgccaacttcacactctttcttgtcaaggccctggcactattcttactcttcctaaagaaagacttagtgtttcagaaggatgtacagcatgggttcagcccaagaaacacagtgagtggccatttaatcaaaaactaatataaatagcttaaagagtgaaaggattattccaataagggctgagtctatttttctacaaggagtgaagccagggagctgaagcagcccagttactcacaaccacagaaatgacctatactgaagacactccactgagtcactgtttaaccacctaggcccctcggcaggaggggactctgctgacaagcctttggggtcagtcctgagacaacaccttgatatgtggcccagtgggtagcaaagaattctgaggtgt

SEQ ID NO: 256 - DNA, 401 bp, Artificial sequence
  /note="Description of artificial sequence: rs1492679"
  misc_feature (134)..(134): n is a, c, g, or t
  misc_feature (204)..(204): n is a, c, g, or t
aaagctacttctttataaaaaggaaaatattgacacactcaaaaagagaagccaaacagcaaaagatttttaaaatgaagcagcggcacagaagacataagaaaataagaggtgaagagagaaaggcaaacacntccgtaacatcaaataagggatgaactgctttattaaaaggaaaaaatgattttcagattgactcaaaanccatgtaaaagctgcatataaaaacaaataacagatgacaaaatggcacaggacatttgagatgacagaagatgggcaaacaactagggaaacaaaatcagaagaaagcaaggtggcaataaaaatatcaggaaagatttaatgtggggcaaagagcattcagtgagcagggtcgtttgataatgataaaaggtaca

SEQ ID NO: 257 - DNA, 401 bp, Artificial sequence
  /note="Description of artificial sequence: rs1238901"
  misc_feature (226)..(226): n is a, c, g, or t
  misc_feature (265)..(266): n is a, c, g, or t
cctttggtttctaagatcagtattttatttatttgatagaatcattcattttaatataatcactttttaataaacagtttaggtgaacagtgcatgcgtgttcacattccagtttcaataaattatgtgtatttgctctcctacccacatttttacacagcttctcagaaatctcttagctcagtcagtcataattccctccttaatgaataatagaattgctttnctcccacagatcattatagaagatgagtagtctacgatnntggaaatttttatatattctatatgcttgaaatgagtatcactagttgtctagcacaggattgttcaatagagcattctgctattatggccatgttctatatatgagctgtccagttcaatagccattggtgaca

SEQ ID NO: 258 - DNA, 401 bp, Artificial sequence
  /note="Description of artificial sequence: rs1219036"
tcataccactgcactccactctgggtgacacagcaagaccctgtatcaaaataaataaattaactaattaaattaataagtaaataaaatgaataaggtggaagaaagtctatgaggttcaagaagtcagggagttgatttatggttaggagatactaggtttgtcaaaggaaataatgtctgagctagacatgaaagaacgtgtgggaactcaacaggtggagattaatgaaaaaagggaatattatgagaaaaatcaaagtggtggaaacattgatcaggcaacaaaataaccactggcagaagaaactttctatgtagagtagtggtgaattctagtaaatgaatgacctgagtgctaatggacattgaatttcaaaatcacgtttcgctacataatt

SEQ ID NO: 259 - DNA, 401 bp, Artificial sequence
  /note="Description of artificial sequence: rs1219037"
tatccaattgccatatgaatataaacttgaatgtctcttaatatcattagaatataaattccacgagactggggactttggctcactaattcacatgcaatagttggcccgtaataggtaccaaataacccttttcctactaaacatttatctaaaatttaatgtcttcataaacaaacttattattttcctcatataagatgaggtcctttgttttaaattttggtctctctaatcactcactgtagcacacagaaagtgactaataatgttagaagtaaatgttttcacaatttaataaaagaggaacaggaagtgttaggtagttttcaaccaaaaaaattatttaaattattaacagttttctttttaagataatgcccaattatacatcaaattta

SEQ ID NO: 260 - DNA, 401 bp, Artificial sequence
  /note="Description of artificial sequence: rs1601856"
ttgattccagatttcttgaaagagtatgagtatgggatgatcaatgtacatttaaatacattacttgtttttgaacaattatctttatagattgatagagaaagagaggaatttattataaggaattggttcacatgatttgggagtctagaagtttcaaaatttgttgtcagcattctagaaaccctggcgagctgccaatatagcttcagtctgagtccagaaacctgaaaaccaggagaatcaatagtgtcagttccagttccagttcaagtctgagtccataggcagaaaaagaccaatgttctagtttgaaaacagtcaaagagcagattttcccttactcagcccttttgttccatccagacctccaaccgattggatgaagcccactccattgg

SEQ ID NO: 261 - DNA, 401 bp, Artificial sequence
  /note="Description of artificial sequence: rs1459841"
  misc_feature (376)..(376): n is a, c, g, or t
tttccttttatggattgtatttcatgcatggagtctaagaactctttgcctagccctaattctcaaattttccttgtgttttcctaaaagttttgtaattttacattttacatttatgtttacaatccatttttggttaatttttctttgaggcatgaagttttcttgcctatgttcatctttttggatatggatgtccaattgctccaggatttgtcaaaaagactgctatcctcccaccattaaattgtttttgtacctgtgcaccatacgaaacagcacattcctatgggtttatttctgggttctctattatgcttcattgttacatgtgtctatctctctgcccatgccattccaaataaaccatagaatnggtttgtatatttaattaattaatt

SEQ ID NO: 262 - DNA, 401 bp, Artificial sequence
  /note="Description of artificial sequence: rs17521564"
  misc_feature (80)..(80): n is a, c, g, or t
ggccctgagtatagaaccaccagaaggtgcagacctgaacaggagatgatatttagtggtcatgaagattataatacacntagaattaaatacattactctatcattaatgacaatgtttgtgcaaaggcacattctgtaaagatatcagcatatttgttttaaatgactagcatggttatttccagctcttttattaagaaaaattatgtcatgacacagttacttaatgtagctcatgtttacaaactttctgacaatttacagataatttttacacccattgtatcccttttgattctcttaattatctttgcctaaggcaaaattatttctgttttagagagaagaatattgaacctcagagattcagtactttgaccaaggacagactgattgcag

SEQ ID NO: 263 - DNA, 401 bp, Artificial sequence
  /note="Description of artificial sequence: rs1770728"
  misc_feature (213)..(213): n is a, c, g, or t
  misc_feature (249)..(249): n is a, c, g, or t
  misc_feature (293)..(293): n is a, c, g, or t
cattgagaaggaaggaaactacactatgtctttccaaaatactgtttgtcgttaatgtcagaactgatgaacaatgatttctgaccacaataaagctttaaaatacctcacagcttcacaacagggtgttctatagaaagttacctttgttgttgcattttactttgatgtctctgaattaaataaatagtcacgaatggcgcagctaacatntttctaattgatcatgaatgtagacatggaaaattnaaggatttctaaaattcgtaccagtttactgtaacaaaagtcancaggtcatgtttaggtcatcatttcaaaggctaaattagttaatgtgtttaggaaaataattttatgtgtttctgtttactttttcaaagattcacttgttttcagaa

SEQ ID NO: 264 - DNA, 401 bp, Artificial sequence
  /note="Description of artificial sequence: rs1770731"
  misc_feature (159)..(159): n is a, c, g, or t
  misc_feature (326)..(326): n is a, c, g, or t
catcatttcaaaggctaaattagttaatgtgtttaggaaaataattttatgtgtttctgtttactttttcaaagattcacttgttttcagaaccacagtttcaaggtcacagtcaaagttttgaagaaacaacaagtcaaattgatgattcattttctnccaagtcttgcagagtttcaggaggcaggtaagtgaaacaaaggcctggcagagctgaatcactggagtaaaacagaattcacacatcagcaagtatatagtgatgcctgttaggtgcttggcactatgcgaaaccaccatcttagtccaatggcgtgcttcgtganatctgagtaccagacgccagaggacacgggcttcaggttggttggagaagctgaagatcatctcattgtgtaatg

SEQ ID NO: 265 - DNA, 401 bp, Artificial sequence
  /note="Description of artificial sequence: rs1770732"
  misc_feature (34)..(34): n is a, c, g, or t
  misc_feature (76)..(76): n is a, c, g, or t
  misc_feature (366)..(366): n is a, c, g, or t
gaaacaacaagtcaaattgatgattcattttctnccaagtcttgcagagtttcaggaggcaggtaagtgaaacaanggcctggcagagctgaatcactggagtaaaacagaattcacacatcagcaagtatatagtgatgcctgttaggtgcttggcactatgcgaaaccaccatcttagtccaatggcgtgcttcgtgacatctgagtaccagacgccagaggacacgggcttcaggttggttggagaagctgaagatcatctcattgtgtaatggaattcagagcaggttctttactctgtatgtcttcccatcatctagaaagggagagttgggctctagttaatccaaggtacctcccaagntggattgttcaaaggacaggatcggcactctgcat

SEQ ID NO: 266 - DNA, 401 bp, Artificial sequence
  /note="Description of artificial sequence: rs1676016"
  misc_feature (168)..(168): n is a, c, g, or t
aatgggctcaattgtttcatgctgaaacaatccttgtacaaaagcttcatggagaggggagagcccaaggtcagggaaactcggtcaggaaagccttggagcaatctgtgcaagaggtgttgaggatttaagtctcttaataatagtagtaatagtgcctttaatcangtggttctttatggttgaaataatgctatcctatcctttagtattgcacagcaaaaaagcactgactttgcattcaaatacacagatggaggccgggtgcagtggctcctgcctgtaatcccaacacttagggaagccaaggcaggcagatcacttgaggtcaggagatcgagaccagcctggccatcatggcaaaaccctgtctttactaaaaatacaaaaattagccgggc

SEQ ID NO: 267 - DNA, 401 bp, Artificial sequence
  /note="Description of artificial sequence: rs1037955"
atacttcaaaattatttaattgctttttaatactaaagtgtttagaacatttttgggcttgccatctcaaaagtgcaataaaagtgcaaagtagtaatactactataatttttgtcttctttcctccatgtatgttttatataaactaattcctagaccacacaaactacttctacacactaacatgctctgtttactgacggacaaaatctttttaccagtcaggacacatccacataaatgaagcagtaaggtaccgcaccctttccacaaactttaagcaggatagggaaaaaattgtaatccccacatgcttttattttttttttttttgaaatggagtctcactcagttgcccaggctggagtgcagtggcatgatcttgactcactgcaacctcc

SEQ ID NO: 268 - DNA, 401 bp, Artificial sequence
  /note="Description of artificial sequence: rs13319"
  misc_feature (151)..(151): n is a, c, g, or t
gttgtttaatgcctttcttatagctgctactggaacactattatgacctaatttatgagccatccttactcatctacaagtgctgaagcaatgttacatacttttttgctaaactcagattttttagcctaatttcttgtcctcctatccncctgcatccacacatggcctgcatggggctgccttccctgcagtgttctacagccatgcttcagggtatagctgttggtggacagcctcaggtcttgggggcactatagccactaaacgaggtgtgaaaggctcaagaggatgaccagcaattaattatccccagaaagtgaaggaaaagagacctttagggatgttgctggtcaagtcttgatttgaccggagtcaaatcaatcttcaagcaatcttgg

SEQ ID NO: 269 - DNA, 401 bp, Artificial sequence
  /note="Description of artificial sequence: rs17067368"
  misc_feature (391)..(391): n is a, c, g, or t
tcctccttcctgctgaggcaaaaaccctctctaacacttgaggcttcggaagacggtacagaaaacctctcactactgcaagagcatgaagctgctggtggagaaggacactgtctaggcagccatggcagcaggcagaggttttccctcaattcccgttttcccagtgagaatcacaaaacagtagagttaacatatccaagtgggcctcttttgatagattaggaaactgaagtgcaaatgattgagtggtaagtgcaaggtcagagctgtcaatagcagagccaaaacaaggacccaggactcctaatgtcattactgcatggaatggatgtaatctgggaagtcacagtctattccacttcttttcctagacccttggcctcttctnccaccaggca

SEQ ID NO: 270 - DNA, 401 bp, Artificial sequence
  /note="Description of artificial sequence: rs12523774"
  misc_feature (253)..(253): n is a, c, g, or t
atccagtaaatgacaatcacagaagatctgttcaaatacttttccctaaggtctggcttcatagactgcaattaaaacattctggtaattgtttagggtattaaagaaggaacagaaatggtcacaactgccacatctgtaactcttcacagcatgtggctctgtaaagtgaaacttttggtctgtaatagcagaattttaatattctgctataagaggtctgtgttattccccccctacccaggccactatnggagagaaagtaaaccaaagcaggtaggagagtcagaagcatgacaatgaggctttaactacgtgcacaatcagaaagacattgaaaactacttaaaaggttttcacatgagattaccactatcatctttcaagtaggaggaaaagag

SEQ ID NO: 271 - DNA, 401 bp, Artificial sequence
  /note="Description of artificial sequence: rs1126483"
aaaaatttgttaagctaaaaattccaggaaaacctttgacaaatatttgatagtcttctagatggaacctcatttttagaaatgtaatagttataattgcatagctgatttttttttcccctaggaatagagacataggggttgtcagaagaggcagcatgcatttcgtttgtttgtttgtttgtttctaaggagcatagcggccaccgatcatgaaccaacagatgccaggaaatcttttccttgttttgatgagcccaacaaaaaggcaacttatacaatatctatcacccatcccaaagaatacggagcactttcaaatatgccagtggcggtaagtattttttaaatgttttgtttatgcagagagtctgttgacaacattaggccagttacctgat

SEQ ID NO: 272 - DNA, 401 bp, Artificial sequence
  /note="Description of artificial sequence: rs12503640"
  misc_feature (242)..(242): n is a, c, g, or t
ataaaatgtttgggtatatgtgtacctctcccagatatagactagagagagaggaggaaacctgaggtaaaggaacatccttcgaatgacaaggcactgaaaagtttatggctccattcctatatgtaatcaaaataggtagcaacaaagtatccaaaagcattttttaaaagtatgataaaatataaataagcttttttaaaaaatatcaagacgactagttcaatagttttctttctttnttttttttttttttttttttgagacggagtctggctctgtcacccaggctagggtgcagtgacacgatctcagctcactgcaacctccacctcccgggttcaagtgattctcttgcctcagcctcctgagtagctgggactacaggcacccgccaccac

SEQ ID NO: 273 - DNA, 401 bp, Artificial sequence
  /note="Description of artificial sequence: rs17551888"
  misc_feature (342)..(342): n is a, c, g, or t
acagcggaaaaaaaggtgttttttcacctaaacttcaaaccaaggttttgcatattcatactaatttatctatgaggaaggagcaaactaaaatttagaaagaatatatcacattgataaggcagaacttaaaaagaaaaaaactgatgtatcactattcctttcaactaagtaccctcctctgctaactttccacctaccactggaagaatatttaaaagaacataaactttataaaatttaacacattaatggcatgttcagtaataccagctatgtaccttaaatatgcatttatatatttaaaaacaatatagatttattttctctttctcatcctgnctacctcagtattgataatgaaacagtttcttcaaactgattattgtgtacatttttat

SEQ ID NO: 274 - DNA, 401 bp, Artificial sequence
  /note="Description of artificial sequence: rs10015807"
  misc_feature (8)..(8): n is a, c, g, or t
  misc_feature (117)..(117): n is a, c, g, or t
  misc_feature (241)..(241): n is a, c, g, or t
ctaatgcnatccctccccgctccccccaccccacgacaggccctggtgtgtgatgttctccttcctgtgtccaagtgttctcattgttcaattcccacctatgagtgagaatatgcngtgtttggttttttgtccttgtgacagtttgctgagaatgatggtttccagcttcatccatgtccctacaaaggacatgaactcgatgttttctttatttttgtcggactgagttagtttgggnagccagtttttgagctctgagattctttcttcagcttggcctattctgctgttaataattgtgatttcattatgaaattcctgtagtgtgttttttttagctctgtcaggtcattttggttctttcttataacggttattttgtctttcagttcctgtac

SEQ ID NO: 275 - DNA, 401 bp, Artificial sequence
  /note="Description of artificial sequence: rs12506732"
  misc_feature (77)..(77): n is a, c, g, or t
  misc_feature (161)..(161): n is a, c, g, or t
  misc_feature (368)..(368): n is a, c, g, or t
ccctggtgtgtgatgttctccttcctgtgtccaagtgttctcattgttcaattcccacctatgagtgagaatatgcngtgtttggttttttgtccttgtgacagtttgctgagaatgatggtttccagcttcatccatgtccctacaaaggacatgaactngatgttttctttatttttgtcggactgagttagtttgggaagccagtttttgagctctgagattctttcttcagcttggcctattctgctgttaataattgtgatttcattatgaaattcctgtagtgtgttttttttagctctgtcaggtcattttggttctttcttataacggttattttgtctttcagttcctgtactgttatnttgtaatccttagtttccttggattggtttcaa

SEQ ID NO: 276 - DNA, 401 bp, Artificial sequence
  /note="Description of artificial sequence: rs1448808"
  misc_feature (92)..(92): n is a, c, g, or t
acataatgaaaatgtgcaagaaatttgatacactatatttgagttttaatttgttggattcataaaatatatagaaaaaattttaattaganttataaatctgcttctttggtggtgtttgtattttgaaattgtaaatgaattcggtaaaattttagctagtgttgtttagaagaatttggttacatttataagtttctcgtaagtgatatatccttaagaggacttgattaagtttgtaagtgctgtttaaatgctcaggagaatttaatgtgtgcaatttgtagataaattcatcactactcaaaaacttaaaaagttagtgttgaaaaaccaccatctccttactcacccttcccacaggccagccctgctcggaagcatcccctattaagtgatct

SEQ ID NO: 277 - DNA, 401 bp, Artificial sequence
  /note="Description of artificial sequence: rs100224"
  misc_feature (347)..(347): n is a, c, g, or t
tgaggacacagcattgaaggcaccatcttggaaacacaaaagcatgtcctcacagacttggaacctgctggtgtcttgatcttggacttcccagcctccagagctaagacaataagtttctactgtgtataaattacccagtctatagtatttggttatagcagcacaaatggtctaaaacagtcatgctgacagtttcaatagaaatttggtaaggagagtcttgcaaaatctgtgagctcttaatacataatatgttttccatcccctgtctctgaggtgttggtgccctacagcacctgctgctagtgtgatggccaccatctactgagcatctgttttgtacnaggcgcgagtaacctggagcagagacttcccatcattcctcaattggcaggatc

SEQ ID NO: 278 - DNA, 401 bp, Artificial sequence
  /note="Description of artificial sequence: rs188122"
  misc_feature (15)..(15): n is a, c, g, or t
  misc_feature (86)..(86): n is a, c, g, or t
  misc_feature (145)..(145): n is a, c, g, or t
acccaatccattccnagtttaaattgtattaaaggtctccttcctctctcccagtctatagcaacgctcacacccaatcctgagtnccaggtgttttaccgttctctggcatgatcagccagctgcctggtagccagctggttanactggaccacttccattgtggacagggcagtgctttattattactggaattgacacttactccagatacggatttgccttccctgcatgcaatgcttctgccaaaacggctatccgaggacttacagaatgcctttcccactgtcatggtattctacacagcattgcttttgaccaaggaactcaccttgtaggaaagaagggctgcaatgggcccacgctcacggattccccagtcttaccatgttcccaccgtc

SEQ ID NO: 279 - DNA, 401 bp, Artificial sequence
  /note="Description of artificial sequence: rs1204842"
actgggtaattctttgttggaggagctgttctgtgcattatataatgtttagcaagatcactggcctctatccactagatggtagtagcagcaccctccacccaccagaaattgccaaatgtccctggggggtgaggggagctaaatcaccctcagtcaaaagccgtaatgtataaaaatatctttccatgaaagacagaatctccagttgtttcttctagatagacaagagagtttgtcagttacgcctattaaattttaccttctgaaaggactatcttctggaagtgcctttttccttttcttataggttgttaatctggtctttgatgctgtgttctcatccagaagacattagatagtcaaaggacagggaactaccattagaagactgagtttta

SEQ ID NO: 280 - DNA, 401 bp, Artificial sequence
  /note="Description of artificial sequence: rs1204843"
  misc_feature (378)..(378): n is a, c, g, or t
acaagatgacctagagcatcttgtagtgccagaagtaaataaatgctttttaaaaattacaatgatggaggtgtgtaaaagggacacaggaattaaaggatagagctcccaatggctaatgctggaacaatttgagaacaaaataaataaagtagtatggaattataacccagagtataaaataaccatcaatgagtctgatataaataagtgattaacaagtaaataaatggggagaagagactaatctaccacacaaaatatttccaaaatagtttatgcacacattttaccttcaagaaggtagagcatgaatttttactccttaagggtagcctgtgcattgtacttccttacaaagagtacagtatggaaagnggggggggaagagtaactttgca

SEQ ID NO: 281 - DNA, 401 bp, Artificial sequence
  /note="Description of artificial sequence: rs1211388"
  misc_feature (35)..(35): n is a, c, g, or t
aaacaaaacaaaatagaacaacaacaaaataagcngggctggacaagcttggtgtgacactaaaatgacaacaatgatactagggaccagaaactgagagtactatttagagaagacttcagactttttttttatgtttcaaaatttagaacatatatttggaaatttggaagtgttcacatatcttacttgagtaattacgagataattttaaaataacatttaaccttagaaagataatttccctgttatctggtaggttggaacttaactgagtcagcagcttctccctctggagccccacagtctctacacagatatacagagcatctgatcttgctagacctagtcttcccaaaggaaattccttaaatatgtggaataaattgggggggaaaaaa

SEQ ID NO: 282 - DNA, 401 bp, Artificial sequence
  /note="Description of artificial sequence: rs1204851"
  misc_feature (42)..(42): n is a, c, g, or t
  misc_feature (314)..(314): n is a, c, g, or t
gtcttaataaaggggataaaacaataagattagtagatatgncagtaaggaatgtgtaatgaaaaaatcaaagagaccaagattttcattccatcctgctgttttcctcattatgtcatgatgataggcaagtcagcctctctaggcctcattttcatatctgcacaatgagattaggttttgtggtccccaaggttctaatagctaccccaagtttctctgctcagtcctttgagaatgatctaatagaccattggaccatctagcccagtgttttttcctggaagtaacaaaaagtagaaccaccctgcctnctgctcagtaggacttttagggttttttcatagcatatgtttcaaaatatgttttgaaggtaagtagcattttgataagggaaatct

SEQ ID NO: 283 - DNA, 401 bp, Artificial sequence
  /note="Description of artificial sequence: rs1209221"
  misc_feature (88)..(88): n is a, c, g, or t
  misc_feature (336)..(336): n is a, c, g, or t
tagattggaagcaggcagtgtgaaaaaggcaaaaataagaccaaagaagaaaaaagaggaatttagatggttaaaagccctgcttagngtagaatattctgggaacccagccattactcaactgtgaacccctcgtgcccaggttcccactgtatttctacctgagtctctgcccactccttgcagaggctataaagagccgccccaggctttctttactctgtgcctcattactgatcattatggaatgaggactgggttcccatcacagattatttttgttatttatattgatttgggagctgagtttagcatagtgtatacatactgaaatgntgtctcggcattctgttaggctacctactacagaagaaaaaccaggttagaagaaacacagtgaa

SEQ ID NO: 284 - DNA, 401 bp, Artificial sequence
  /note="Description of artificial sequence: rs1204782"
  misc_feature (229)..(229): n is a, c, g, or t
  misc_feature (290)..(290): n is a, c, g, or t
acttgcctgatattaggagtataaacatgaatgttaagatggttcttttcttaaaagatctcagagtctcagaagaaagaaaaatacataaatatgcttattacaagtgttgattatagtgtaacatgatgaatgccatcattgatgtgcagagtgggtattggggagggctcctcatagaaggtaaccttgtgacaagcctccaaggttcaccaggcagcagaggganggcagagtattccaggaagggagataatatttatgccttaattttagacgtttatttgggnttttttttcctatctcagtggaaggtctgagtttccagataatagcagagacaatatcagttcagtgacaaagaacttctgcagaaatcctgaggaaaagcagaattgaat

SEQ ID NO: 285 - DNA, 401 bp, Artificial sequence
  /note="Description of artificial sequence: rs1204783"
  misc_feature (173)..(173): n is a, c, g, or t
  misc_feature (262)..(262): n is a, c, g, or t
  misc_feature (388)..(388): n is a, c, g, or t
gaatgttaagatggttcttttcttaaaagatctcagagtctcagaagaaagaaaaatacataaatatgcttattacaagtgttgattatagtgtaacatgatgaatgccatcattgatgtgcagagtgggtattggggagggctcctcatagaaggtaaccttgtgacaagcntccaaggttcaccaggcagcagagggaaggcagagtattccaggaagggagataatatttatgccttaattttagacgtttatttgggnttttttttcctatctcagtggaaggtctgagtttccagataatagcagagacaatatcagttcagtgacaaagaacttctgcagaaatcctgaggaaaagcagaattgaattttataattattatncaataattatata

SEQ ID NO: 286 - DNA, 401 bp, Artificial sequence
  /note="Description of artificial sequence: rs1204784"
  misc_feature (112)..(112): n is a, c, g, or t
  misc_feature (140)..(140): n is a, c, g, or t
  misc_feature (327)..(327): n is a, c, g, or t
aaatatgcttattacaagtgttgattatagtgtaacatgatgaatgccatcattgatgtgcagagtgggtattggggagggctcctcatagaaggtaaccttgtgacaagcntccaaggttcaccaggcagcagaggganggcagagtattccaggaagggagataatatttatgccttaattttagacgtttatttggggttttttttcctatctcagtggaaggtctgagtttccagataatagcagagacaatatcagttcagtgacaaagaacttctgcagaaatcctgaggaaaagcagaattgaattttataattattatncaataattatatagctaaacaggcataccatttaaagcatttgatttctgcttctgaacgcaagttatttttct

SEQ ID NO: 287 - DNA, 401 bp, Artificial sequence
  /note="Description of artificial sequence: rs1204785"
  misc_feature (4)..(4): n is a, c, g, or t
  misc_feature (346)..(346): n is a, c, g, or t
  misc_feature (366)..(366): n is a, c, g, or t
gcanctagtctacaaagatagctctctaatgaatcatgcctcccagaagtcacacctttctgttttcttctccttgaaaatgagctggacctctatcatcagtaaaattcagcagaagtgctactgtaaaattcctaaaactaggtcataaggagccttgcagcttttgcttgtcttaaaacacttgctctgggggaaacacaccgccacttaagaagtccaactactgtgagacccaaatgcagagagaaagctcaagctagctaagtggagagatgtttgtttcaccagctctcaccgttccagccagcccagcccaggtgccagacagtgagtgaagaaaccnttagatgattccataccccngggcacaactccaagtgagaaatgcctggctgagt

SEQ ID NO: 288 - DNA, 401 bp, Artificial sequence
  /note="Description of artificial sequence: rs1204786"
  misc_feature (183)..(183): n is a, c, g, or t
ttatgctgacaaaagcttttcatgtatttacattttgtaaatttatatgcagtagaaacctttgagttattttttggaggtgaagaaaaacaatttagagcctgtttacttttatttcatctgtttctaaaaggatttgtgaatattttatcttgaattgcatagagataataattaaaattnggactttattccaaagcatcttgtttagattatctattgctccataggataccaacacacaaaactcagtatcatgtcacttatggattctgggcttagttgggtgcttctaaacgtgggggtctctcctgtggttgcagtcagatgtcagtggggacagtagtcttctgaaggcatgactgggctggatgtccaaggggctcactatgtcttgcagt

SEQ ID NO: 289 - DNA, 401 bp, Artificial sequence
  /note="Description of artificial sequence: rs1204788"
aacggtcctttgaagctgcctgtttcacaggtttgtaaatgtctgattggccagtgtgtatctctggggctccaccagaggtctctagggtggggggcataggaattgttaacatcatcattctctggacacactttcttgtgaaaagtgtcatccagaatagaacccagttatcaaggtttagtctgaaaatgattaaaagagtggaaattattgctttcctggttctgaacattgtactgatattaatgtagctctacaatctaatcacctaattggataatacggagcacatgaagataagatgcctagggttataaaggaggacacatgcttcttacccagctttctggagcagaaatatttttccagaaacatgatatcaaaagtacatagtagta

SEQ ID NO: 290 - DNA, 401 bp, Artificial sequence
  /note="Description of artificial sequence: rs1204789"
tatttttccagaaacatgatatcaaaagtacatagtagtaactaaataaattgcaaaacatggtctccaaactttttattttactttgtctatactgtggagcctaagctgactgtaagctctatattttgaagttgctgacaaacaacagctcctccaatgttatgcctgtatggctgagctttcaacctggtaagattacatctctccctatgaaattgtacctcactgagtcaccttgtcgactttacagcctgtccagatattattgtatgtgattctgtcatcagatccatctgctgaccctcccagctgtcagcgtcctcattaaaggatttgttatattttgaataaaaccaggcagaccttcaaaaacctctctccacatttacgttgtctgt

SEQ ID NO: 291 - DNA, 401 bp, Artificial sequence
  /note="Description of artificial sequence: rs1204794"
  misc_feature (46)..(46): n is a, c, g, or t
  misc_feature (137)..(137): n is a, c, g, or t
  misc_feature (365)..(365): n is a, c, g, or t
  misc_feature (373)..(373): n is a, c, g, or t
ctactagggaggctaaggcaggagaatcacttgaacccgggaggcngaggttgcagttagccagagatcatgccactgcactccagcttggtgacagagtgagactctgtctcaaaaaaaaaaaaaaaaaaaaaaanaactcttcttcctgatgtcctgatattcttgaaatataactgccaagtatttcaagtgtttcacactggagagagtcacggatgtatcccatatctagctattgcagactctatcattcagtacaagctgtttaacctttttttttttttttttttttttgtctatgcatgtgtccttttcctaacaattagagaaagtaaaatcttgaatcctttttatctgcttantagttctntcatgctctgagaacagtatgtgttatg

SEQ ID NO: 292 - DNA, 401 bp, Artificial sequence
  /note="Description of artificial sequence: rs1204797"
  misc_feature (30)..(30): n is a, c, g, or t
  misc_feature (38)..(38): n is a, c, g, or t
  misc_feature (157)..(157): n is a, c, g, or t
  misc_feature (232)..(232): n is a, c, g, or t
taaaatcttgaatcctttttatctgcttantagttctntcatgctctgagaacagtatgtgttatgaatctagtaacatttcaactaaatctgcaattgcctgctaagtacccacaactttaaaggcattgggtcaagcactatgggtaagtctggncaggacatctggaaacactgccaccatctgccctggagctcagccagaccccgtggccactctaaaggggcagancaagcaaccccgcttcagtgatgcgagtcattcattgttccctgtcaaatacagtgccttttggcctgttctggcctattttgcaccgatttttccattttgatatctcagcacttctcagaggctatagaatggctcccctagtatagattccatctgaaatagcaaa

SEQ ID NO: 293 - DNA, 401 bp, Artificial sequence; identical to SEQ ID NO: 53
  /note="Description of artificial sequence: rs1204798"
  misc_feature (161)..(161): n is a, c, g, or t
  misc_feature (290)..(290): n is a, c, g, or t
  misc_feature (299)..(299): n is a, c, g, or t

SEQ ID NO: 294 - DNA, 401 bp, Artificial sequence
  /note="Description of artificial sequence: rs1204799"
  misc_feature (63)..(63): n is a, c, g, or t
  misc_feature (103)..(103): n is a, c, g, or t
  misc_feature (192)..(192): n is a, c, g, or t
  misc_feature (350)..(350): n is a, c, g, or t
agcactctctgaaagatgaccatgacttgctataatgctgctttctgtgggacccatgtaacncacaaaattgttaactcttcaagctaacaaagccagccantttcaggcccccaaatttgaagatagattttccaaatatttccagctgttagaaactattgagttcactaccaaagccagcttggtacntagagtctatgtgctactctcttttttttcctgattatgtttatacttcaaagagttgtcaggaagactagtactcacccaccttctatttccagtggaatgttcaccttaaagtgtgtgagaaaaatataaagcatgtaaaagttagtcaaaagatnaatgatgctgtggtaaaatagataagcaaagatcaagttctgttttatatg

SEQ ID NO: 295 - DNA, 401 bp, Artificial sequence
  /note="Description of artificial sequence: rs1204800"
  misc_feature (43)..(43): n is a, c, g, or t
  misc_feature (52)..(52): n is a, c, g, or t
tgttagaaactattgagttcactaccaaagccagcttggtacntagagtctntgtgctactctcttttttttcctgattatgtttatacttcaaagagttgtcaggaagactagtactcacccaccttctatttccagtggaatgttcaccttaaagtgtgtgagaaaaatataaagcatgtaaaagttagtcaaaagataaatgatgctgtggtaaaatagataagcaaagatcaagttctgttttatatggaccttttctaattcttaaaataaacttatgaaaaattgtgttgcttttaggaatgattttacagacctttttgacattgtgattacaaatgcattgaagcctggtttcttctcccacttaccaagtcagagacctttccggacactcg

SEQ ID NO: 296 - DNA, 401 bp, Artificial sequence
  /note="Description of artificial sequence: rs1204801"
ggtagcacgtgtcaagcaccaaggcattttctgtgcaccagacagatgtgtgaacatgtgagcacatcagcaagtgcaagggatgcttatggattgtagcacgtgtcatgaagctaataaccaccttatgaggtacagtatatggggcaggcctccttagagtggctggccagggaagctctgtccaaaaaggttaggtaaggtgacttgcaaggcgagccctaagggacaagtgctgagaagagcagaggaagagtgttcctggcagtggatcaaatgaatgccaaggcccagtaagagagtagttttgtcacattctagtaacagagaagagacctgccattctggcacatggtcatggggtgggagggggtgaagttagggaggcaggcacccgcata

SEQ ID NO: 297 - DNA, 401 bp, Artificial sequence
  /note="Description of artificial sequence: rs1204802"
  misc_feature (175)..(175): n is a, c, g, or t
ctgtcgtggtttggtccagagcgacagtactggaaatggagagaggtagatacatttaaatacattatggagttggaaaacacagagggctcggtgatacttaaagaaacagcagacaaaaagaaaggagtaataaaaaataacttccaggtggttgatttttctttttcctcanatgagcaagtgagtagatggtggtaccatttacagacttggggaaaaatacagaggataaagttgtgtggagtaggggttatatctgttaagaactcatttttcaacatgttaattttgagatgcctatgagttatgtaactgtcactatcaattaggaaattgtataaatatgcctggagtccaagggaacaagtctaggctcaagatatgtattgggagtaatc

SEQ ID NO: 298 - DNA, 401 bp, Artificial sequence
  /note="Description of artificial sequence: rs1209223"
atataagtaagtacccaataaatatttgtttttatttttatttttgtggggtttgcatattttgttccaagaaaatctataccccttttatacccatagtagtatttatgccattccataagatttttattaaaatttcacacaaagatacaattaatggaaaactgcacgttaaaaatataccaagttttttttaacatattggaaattataaatgcattaaatatgctgacaatttacagcattttatgtagtttttctctatttaattgagagtatcctgagaaaaagggtggagtttttaaaaaacgattactttagaagtacctatcttaagacttctgtgcagtattttctgttagttgtatagtacaattggatttgagggctgacataataat

SEQ ID NO: 299 - DNA, 401 bp, Artificial sequence
  /note="Description of artificial sequence: rs1204807"
  misc_feature (28)..(28): n is a, c, g, or t
  misc_feature (31)..(31): n is a, c, g, or t
tttgttgactgttttctttgtggttgcntanctttttagtattatgtaatctcatttatctatttttgcttttgttgtctgtgcatttcgggatatagccagaaagtctgataaaaatttcattttaactagcagtctactgtgtttcattctcttctgtggttttagagatgaaaaatctggattgatgaagcaggaccaaaagtcctaccagtctctgtaatgaagactgtaaagtgcttagcaatctcagcgtatataggatttcatgctttttgtacagatatttagaaaaatttacctcattttggccgggagcggtggctcacgcctgtaatcccaccactttgggaggctgaggcggacgaatcacctgaggtcaggagttcaagaccagcctg

SEQ ID NO: 300 - DNA, 401 bp, Artificial sequence
  /note="Description of artificial sequence: rs1204814"
  misc_feature (138)..(138): n is a, c, g, or t
aaaggctccatctctaaatagtcacattctgatatactaggggttattattttaacttatgatttggggagaaacataattcaggccataacaagtatatacatatgctgaaactcatcaaattgtatgctttaaatntattccatttattgtatgttgattatgtctcaacaaatgtgtaaaaacatggaggaaaagaaaatactcatattcgtatttgcttttatatgcataaaagaggagaagaggtgagtgcataccagatagagttcaaaaataagacttaaaaaacatgtaaatatattactgattcagaaaaaaatctcataaatgcatatttttaaacattaataaagtagtgacaccaagcacttggggagtttaggggaggcagcagtctc

SEQ ID NO: 301 - DNA, 401 bp, Artificial sequence
  /note="Description of artificial sequence: rs1204817"
  misc_feature (306)..(306): n is a, c, g, or t
ctggcatttgaggctgcttttccccctgggtatttgctgattccggaggcggcaccacagagggtgagtgggcctttcagtaacttcatgaatctacaggaataggaactggaggagagggcctgcctaaggagggtgggtctggtgaactccctcaatctatgttgaggccttgaagggctttactttagaataaggataaattgagaagaaatctccattttcacagggactaaaactcagcttgaaatcagctaaatacctaaaattggattgaggagatttcagattattagtgcccctgcncacctggtagaaacaaatatagattctcttttgaggaagataacatcattctaggactcaaattatttctaaaaacaattcatataaaattcagt

SEQ ID NO: 302 - DNA, 401 bp, Artificial sequence
  /note="Description of artificial sequence: rs1204818"
  misc_feature (96)..(96): n is a, c, g, or t
gaactggaggagagggcctgcctaaggagggtgggtctggtgaactccctcaatctatgttgaggccttgaagggctttactttagaataaggatnaattgagaagaaatctccattttcacagggactaaaactcagcttgaaatcagctaaatacctaaaattggattgaggagatttcagattattagtgcccctgcacacctggtagaaacaaatatagattctcttttgaggaagataacatcattctaggactcaaattatttctaaaaacaattcatataaaattcagtgcataatgaaaaatagccgggcacataaagatatgagaccacactaacagaaataaccatgttaattatagtcaaatacagaaaaggaaggaatgagaaatttgg

SEQ ID NO: 303 - DNA, 401 bp, Artificial sequence
  /note="Description of artificial sequence: rs17151230"
ggtggtgatgcactcagggagctggaggatccgttttccctcatcaggtatcgggggcttctccacctccctctcaggggtgaacatagccagccaggcagctttccctgtgaccagcgcctgcctctctgcagattgcagtgtgaagtgccttgtgggtttcatgttcccctgagttgattcaggtgtaagtataaaaccgatggcagttggagaaggtcagcattacatattcattttattttaaataattgatgatgtttcctgtctctgcttacattaattgctctcaggtgttagaaaatgactcagtgagttgccttttaatatgcttttttagaaagacagtgtgtctgctctttggaatactaaaagccgcatgtactgtgcaggactttcta

SEQ ID NO: 304 - DNA, 401 bp, Artificial sequence
  /note="Description of artificial sequence: rs17151248"
aatctggagagattataaaacaattcagtataggtctataatagattcaacacacaagaaaacctagacaaaaggaatgctcttgtaatatgttaactcaaaactagaatgagtaaacatgtttttcataatatctacattttttaacttatcttttattctgagaaattattattaggatcttaatgtaaagccgcattccattcagaaatccttgatacctcacgtggaactttgactagcagatattcaaagaaacttttgctacctgaataattggtggaaaactgcataacactataatcttcttaactgctaattatttggggtcagtttttataaaatattaactcttccctttaccattgtgatagttaatactgagtggcaacttgattgga

SEQ ID NO: 305 - DNA, 401 bp, Artificial sequence
  /note="Description of artificial sequence: rs10857200"
  misc_feature (210)..(210): n is a, c, g, or t
  misc_feature (338)..(338): n is a, c, g, or t
aacttatctagcaaatttatcacattccagagtcttatacactaattttcaggtgcaaacatttattggattagccaatataattattggcttcaggcccctaagaatagcagtatagtattctgtttaaagcacagattctgggatagactgcttggattgaattgtggtcccatcaccttctagccatatgaccttaaacaagttttntaatgtttctgctcctcagtctttccatctgtaagataaagatattagtagggcttttacaaggattacgtgagataaatacttataaagcacaaagaacagtgccttctcattgcaaatgctttgtnagtgttaactattgtttaagaatagagttttaaaccaaaaaaaaaaaaagctaataaaaggcc

SEQ ID NO: 306 - DNA, 401 bp, Artificial sequence
  /note="Description of artificial sequence: rs10857201"
  misc_feature (192)..(192): n is a, c, g, or t
  misc_feature (329)..(329): n is a, c, g, or t
agcaaatttatcacattccagagtcttatacactaattttcaggtgcaaacatttattggattagccaatataattattggcttcaggcccctaagaatagcagtatagtattctgtttaaagcacagattctgggatagactgcttggattgaattgtggtcccatcaccttctagccatatgaccttaancaagttttataatgtttctgctcctcagtctttccatctgtaagataaagatattagtagggcttttacaaggattacgtgagataaatacttataaagcacaaagaacagtgccttctcattgcaaatgctttgtnagtgttaactattgtttaagaatagagttttaaaccaaaaaaaaaaaaagctaataaaaggccagtgtgatt

SEQ ID NO: 307 - DNA, 401 bp, Artificial sequence
  /note="Description of artificial sequence: rs17713386"
  misc_feature (67)..(67): n is a, c, g, or t
  misc_feature (75)..(75): n is a, c, g, or t
  misc_feature (329)..(329): n is a, c, g, or t
tgagctaggctcacccagcactttctccctggggacgtttatcaaaacaatcagcagcaatttagtngacactgnggcaaacaacaagctaacagaaactggaaaatgagatgcccacagggggcctgggaagccattatgtttctggggttacacaagagcctgcaggctccaggctgagtgctgctcatgaaatacctaaataagttgggtaagtagaagtgctgacagcaaaactctccccccaacttttatacccaacaagactatccttgaaaaataaagaagacattcccagataaacaaaacccatgataacccattgctgncagacctgctctagaagatataccaaaggagcccttcaggctgaaagaaaaggacactagacagtaacttga

SEQ ID NO: 308 - DNA, 401 bp, Artificial sequence
  /note="Description of artificial sequence: rs1109089"
ttctgttcattagacgcacgtcactaggtccatgcagggagatgacacacagtgtggccactaggagagcaggagatctgggagccggctccaagctgcctgccacacagtcctagttctttcagctgtttctcacgtgacagggtactgtatttttgcccaagtggcgacacttttaaagataggcaaatacagcatgcagaggaaaccgtggttctgtaatgcaaccgcaggtccttaggacacccatatcccatttgttgacccacagcgagcttgtaggggggttaaatttcatttttgtttttatcaaatgacagcacacatcgtttaaaatagcacagtgtgtaattcattcaacaagctaacttattctgaagcttgtgatgcaatcatgaaca

SEQ ID NO: 309 - DNA, 401 bp, Artificial sequence
  /note="Description of artificial sequence: rs17713697"
  misc_feature (273)..(273): n is a, c, g, or t
aggtaaaaggcatataacaaaagaaaacacacccattttagtaaggagaaacttggtcaaaacttgcaacagtgccactgagaagacacagtaccaagctttttgtcctctgctttgcactaggccagtgttttctcaaatacataaggtccttggtgagcacactttcatatttttaatccagctcaatgtatttttcaatttccccagtggcacatgctatgttttcaacttgattctataatgtcatctaatttgtgcacaccaaaaaanagacttaaaaaaaatcagtggatgcactaagaaaattttctacctactactttaatgcctcaaagtaacaatttgtaaagtaacaccaacactgttttctaaaaatcagctaggataaaattgtactt

SEQ ID NO: 310 - DNA, 401 bp, Artificial sequence
  /note="Description of artificial sequence: rs17713890"
  misc_feature (210)..(210): n is a, c, g, or t
  misc_feature (315)..(315): n is a, c, g, or t
ttcaacagcacgcgccactgtctggtacgaacgtttcattcttagttgaaactaaattgtcaacataacacatgtcctaagcactattatggaaaaatcacatcatggtaccagaagattaagcagcagtctattatttttgtaaacttatagtatggttataaccactgtttatgacagcccagaattactgccctatgataaagttcnttaaagaaaaaaaaaaaaagaaaagaaaaattaagttttattataaattctttgatataataaataagattaaaaacaaaatcccaaatgattttaatcactagntcagctagagtaggttcaaagttaaaattctgttttccctaaagggaaactgtggaaacatagaaaaaagaagttatgtctaagaa

SEQ ID NO: 311 - DNA, 401 bp, Artificial sequence
  /note="Description of artificial sequence: rs11772458"
  misc_feature (216)..(216): n is a, c, g, or t
accttacagaaaatgatctcagccacttacagctccattttactcacctaaattaaatgtgcccatggggatgcacctgtgcgccctgcagaactataacaccactcacaacaggtgcgtaggtcctggcttgaggaaccttcaaggaaaaggtcaggtaaatagagtttaaagtactggaggcaattaaggaagaggaacagaagcagctctctnactttaggggaaacatcaatgaaagaaatcaaacatcaatgcaacctgcagaatagaactcaatgagtaccactgaattgaaaggatacagtagctgtaatcctagcaattttggagactgggctgaggctggcagatttcttgggcctaggaattcaagaccagcccgggcaacacagtgagac

SEQ ID NO: 312 - DNA, 401 bp, Artificial sequence
  /note="Description of artificial sequence: rs12112989"
gtagggaaaactgctagctcggcaccccttggcatgaatcaaaaacagtagttacaaactgagtggtaagtcactgtattctttactaccatgcattcacagtgggaaaagagctgtttctacttaacagtgtccttgaaaaagcagtaaaattatattaaatcttgaccctttggtacctgtctttttaatattctgcacgacaaaatgagatgtacacataaagcacctctgttacatactgaagtatgatggttgtttccaaaaaaagcacttgtgcagtcatttgagaagtgatctgaactggccacttttatcatggaatgccttttttacttgcaagaatgatgacaaactatcattattgcaaatgtgaatagctggcagacattttcttggaa

SEQ ID NO: 313 - DNA, 401 bp, Artificial sequence
  /note="Description of artificial sequence: rs12112134"
ctgaggcaggaggatcacttgagtccaggaggttgacactgcagtgagccatgatagctccactgcactccagcctgggcaacagagcaagaccctgcctcagaaaagtaaataaataaaaaataatagccaaaaaaaaaaagaaagaaaagaaaccacccacatatccaattgacaaatgcatagaaaaaatgtggtatactcacatgacagaatattagtcagcactaaacaggaagaagcgacatatgctacaacatgaacgaaccttgaaaacattatactaagtaaaagacgccagccccagaagaccacatatgtatgttcttatttatatgaaatgtccagagtaagtaaattcatagaaacagaaagattagtggttgccaggggctgacagg

SEQ ID NO: 314 - DNA, 401 bp, Artificial sequence; identical to SEQ ID NO: 25
  /note="Description of artificial sequence: rs12617566"

SEQ ID NO: 315 - DNA, 401 bp, Artificial sequence; identical to SEQ ID NO: 10
  /note="Description of artificial sequence: rs1421780"
  misc_feature (107)..(107): n is a, c, g, or t
  misc_feature (114)..(114): n is a, c, g, or t

SEQ ID NO: 316 - DNA, 401 bp, Artificial sequence
  /note="Description of artificial sequence: rs177295"
  misc_feature (107)..(107): n is a, c, g, or t
atggtctcgatctcctgacctcgtgatccacctgcctcggcctcccaaagtgctgggatttcaggcgtgagccaccgcgcccggcccctatttcccctttttataanaacatcagttgtattgcgtttgagctcaacttagtgactccattttaacttcatcacccctttaaagactctatttccaaataaggccacattcagaggaactaggggctggaaatcaacatatcttttttaggggaaataaactgtaacaccaactgaatcactctcttttcctagtatatctcatgtttttgttcctttaagtagagctgccgaatttaataaatagaaatatagtagcctcagataaattcgaatttcacataaagaacaaataatttttagtataggtat

SEQ ID NO: 317 - DNA, 401 bp, Artificial sequence
  /note="Description of artificial sequence: rs11710431"
  misc_feature (249)..(249): n is a, c, g, or t
  misc_feature (346)..(346): n is a, c, g, or t
ttgatcaaatactttacttttatctaaaatacgaccatattgttgcatctgtaaatatagtaatttgcacttatatgatctctcacattgtgatatggtcaatttttgttaagttttctgtttttgcttaaaaagaatacatgatctttattttttagatctatgacatccaattaaccaattgtatctgtttaattcaaatagtctaaatgctcactaatattatatgtttaatacatttagtttctnggacagatattttaaaatgtcattgagattatacttgtaaatctttttagttttgctatataaatttcaaaagaaaaatgtgttcatgcaagttcantattgtaatatcttttgtttttccttttctgattttgcaaaatttctctccaacc

SEQ ID NO: 318 - DNA, 401 bp, Artificial sequence
  /note="Description of artificial sequence: rs13091297"
  misc_feature (136)..(136): n is a, c, g, or t
  misc_feature (245)..(245): n is a, c, g, or t
atacaaatataaatcaaaaccagataaagattgtttaaagtattgattattaattttggaaatgaaaatatctacattaaaattaaattatgagatgcatgccagtttaggcaaagacacagagaaaataagaganttgaaagactatactgaggaattaacccagaccactatgaagaaatataaataggtaaaaaaaaaaatgtgaaagataagagaagaaacatgagggatagactgacatntaatggaaagtttatgaagtagaagatataggtaatgacagaaaggtagtatttgacgtatgatgcagtttggctgagtccccaccctaatctcatcttgaattcccacatgttgtgggagggacccagtgggaggtaattgaatcacagggcagg

SEQ ID NO: 319 - DNA, 401 bp, Artificial sequence
  /note="Description of artificial sequence: rs11922088"
  misc_feature (264)..(264): n is a, c, g, or t
  misc_feature (322)..(322): n is a, c, g, or t
  misc_feature (338)..(338): n is a, c, g, or t
  misc_feature (356)..(357): n is a, c, g, or t
gcacaccagtaaaattgaagaagcattgaaaagttctgtgtaagtaccagcttccctgtcatttgagtcactgctatcactaaatctataaaactgaaactttgtacaagtacctaaaatgttattctttgtgttctcatttggaaaaaataaatgctgacctagcaattgtaattaaaatatttgttactaagctgggtaaagatgcaaagaaatcaactgaatattttagagcacacagtatgtgttatctcatttaatgcncatgcaaacattgcaaaatgttatcctttttgtaaagttatgttatataacttgactnagttgctttgtaacanaaaacttagattaagtgnncaaatatttcccactgtaaaacagaatttaatccactgtgttat

SEQ ID NO: 320 - DNA, 401 bp, Artificial sequence
  /note="Description of artificial sequence: rs10171173"
acttctgaggaaatattcctatttttgaagataaacagaacatttaaatacttgtcttttgatcttcaattacctcagtaatgtatctaggactaaatacaaacaacaacaaaaaaattaagttgtaagcttggtcaaacatgtccacaccttaagagactcaaagatttattttgacttatatcttctgagttttaacaatgacccagtattctgactctatcacttacactctctttcattgtgcaattatttccctcataacctttgttatccaaaagggagccccgagaccagcagcatcattaccctggagattgttagtaatgtagatactaaggccccactctaaagctgatgaatcagaatctgcctttaaaatatatgggtaattcatgagt

SEQ ID NO: 321 - DNA, 401 bp, Artificial sequence
  /note="Description of artificial sequence: rs10497528"
ttgaaataagaaccagtttctcttggactcatatgcgcttccagctatatgaatgtctcttcaatttggatggagtaataatattaaacatatgaaaaaacctctttcctgtgtatctaggccaggagacctccctccacataatttctccctaaaaattccttccacttaatctgtacagatttaaacatggaattaagacaatcagaattgttgtgacaaacatctcacttatttgagttgggggtttgcaaagagagttctgcccactcttcacatcaaataattgtagcagaaggaatgcatgtcaagcacattgacgacccatcagaaatgtgcctgcagcctgggtaatgagctctaatgagcctgcaaactcatcaacccccaaagccctctga

SEQ ID NO: 322 - DNA, 401 bp, Artificial sequence
  /note="Description of artificial sequence: rs13403584"
  misc_feature (215)..(215): n is a, c, g, or t
ttttcactagattcaataaaagctcacgcaagtgtaagtataagagtgttgggcttaattatggtttggcctactatttccttttacttcatgttatatctgaaaggaatttactcatcatggagaaaataagctacattaacactaaaacacagtgagaaacaaatattgctccaatgctagaaaaaaagaaaatttccagggctcaaaagagntgagtttcaaggacagttgacacctataccctacttactaagatagagtgaatcagatatagctataatttggcctctgtaggtgtatttcagctgtttcatttcttttcagggaagaaagatggtgtatgaaactttttccaagatggtctctgaaatgagttaaacttcggtgttcaaattgtg

SEQ ID NO: 323 - DNA, 401 bp, Artificial sequence
  /note="Description of artificial sequence: rs10930847"
  misc_feature (310)..(310): n is a, c, g, or t
aaaatgtcatatttttcaaagctaatgctttatcataatgaagcagtgctcttacatcaaaatgaatgggctgccacctgacacagaagttaaaagtgaaatttccaataactgtcttataccaaatataacacctcttttgataatgttctttgaactctcatattttgaaattagaaacctcaaaaaattgtagaattcgagaaaaatcacatggagacatgaccttcttaggtctaggaggactttttccttctcttgtattgtaaggtgttcaaactatggaaaatcaactatacgccttaggaangtacttataaaatgctatatttatgaatcaaatatcctatggaatattctataattgcctttttaaaacataggcagcaaaaggaaatttt

SEQ ID NO: 324 - DNA, 401 bp, Artificial sequence
  /note="Description of artificial sequence: rs1847420"
caattatttgcaataaactaagctttactgggcttgtttctcacaacctttattcttgatcactcttcagggtgtgttcttattacttttcttattttttttggaactgttagattaacataatattctataccccttgggaatgtagacatgtgtctttgacagatgtcagcagtgtttggacaatgtttaaatgtgaacgcccttagcctggccatgcttcctggctcacctcaatcctgatcgctccttccttcctgtttgatacaccttcttgcataacagtttgtgtttataaattctgtttcctagaccacatgcaatttctactatccaagtgtttaaaatgtgatcctgtgttcttacattaagttaacaccctgccttatgcctttttcttt

SEQ ID NO: 325 - DNA, 401 bp, Artificial sequence
  /note="Description of artificial sequence: rs10866319"
  misc_feature (3)..(3): n is a, c, g, or t
  misc_feature (150)..(150): n is a, c, g, or t
acngaacaatgggatttcatctagattttctgattaatttggtattttactttgccattataattcaatttatgtagcttttctgttcattcctcaaaggcatttttatcattcatgaaaatctgaaataaaaaggaaaaatatttcaanattcattttctcccacagggatccttgtgctgctgcactgcaaacagctacgtagaacaggcattttcaatgttttttttgtgccagaaagcaagtttcaactctttcatatggttattttttattgctcacaaaacaaatgaaaaaaaaaatgaaattacttactattatcagcaatattgattatctaattatccaacaacaaaataaaggtagctggccaggctcagtggctcatgcctgtaatccca

SEQ ID NO: 326 - DNA, 401 bp, Artificial sequence
  /note="Description of artificial sequence: rs12564388"
  misc_feature (7)..(7): n is a, c, g, or t
  misc_feature (394)..(394): n is a, c, g, or t
cattcanctaaagcttccagaatgggatatttagaagcttagaacattcttaccgactattgcagtacgacaaagcaaaccattactctttaaagaagttgctctactttttacgtgatgcatttgaagaagttggtagttgtaggtcataaacttagagaaaagaaatataaactgaaaacacttcactgatgataaaggtcatcaggcacagccttgaaaatggccaggctttgagtgagagctgggaggagctttgctcctacttggtgtatccctctgggtctgcacttaagccattcaaaaaatgtttctatttaatttcctgaggactaggatttttgacaccttttagtagctgctttcagtgttaaaaagcgaaaagttttagctngttagta

SEQ ID NO: 327 - DNA, 401 bp, Artificial sequence
  /note="Description of artificial sequence: rs11122569"
  misc_feature (192)..(192): n is a, c, g, or t
  misc_feature (227)..(227): n is a, c, g, or t
acctctggtagaattcagctgtgaatccgtctggtcctggactttttttggttggtaggctattaattgctgcctcaatttcagaacttgttattggtctattcagggattcaacttcttccaggtttggccttgggagggtgtatgtgtccaggaatttatccatttcttctagattttctagtttattcncctagaggggtttatagtgttctctgatggtagtntgtatttctgtggaatggggggtgatatccctttatcattttttattgcatctatttgattcttcttgcttttcttctttattagtctggctagaggtctatctattttgttgatcttttcaaaaaaccagctcctggtttcattggttcattgatttttttgaagggtttttc

SEQ ID NO: 328 - DNA, 401 bp, Artificial sequence
  /note="Description of artificial sequence: rs11122570"
  misc_feature (259)..(259): n is a, c, g, or t
gcatttagtgctataaagttccctctacacactcctttacatgtgtcccggagattctggtacgttgtgtcttcgttctcattggtttcaaagaacatctttatttctgccttcatttcattatttacccagtagtcattcaggagcaggttgttcggtttcttaatcctgagttctaatttgattgcactgtggtttgcaagtctgtttattatgattttcattcttttgcatttgctgaggaatgttttacttccanttatgtggccaattttagaataagtgcgatgcagtgctgagaagaatgtatattctgttgatttggggtggagagttctgtagatgtctattaggtcctcttggtccagaactgagttcaagtcctgaatatccttgttaat

SEQ ID NO: 329 - DNA, 401 bp, Artificial sequence
  /note="Description of artificial sequence: rs12143647"
  misc_feature (380)..(380): n is a, c, g, or t
ctcgaagcagggcatgaggccctttttgttcttgcctggtagctctccactgtagaaactttccctccatagccctggatgctccagccacacagtgctagctgcctttccccagctcccttgtactcacgtgcttctgcgtttttcctctgcctgccctccccttcctgtgccctttgttttcctgtcaaactgcctctccacatgaagctccagctcagataccacctccttcaagagaccatccttgaccgggcgtagtggctcacacctgtgatcccagcactttgggaggccaaggcaggtgaatcgcttgaggccaggagttcaagaccagcctgggcaacatgacaaaaccccatcttaaaaaaaaaaaaagnccattttttctcctaatgttc

SEQ ID NO: 330 - DNA, 401 bp, Artificial sequence
  /note="Description of artificial sequence: rs12041242"
  misc_feature (214)..(214): n is a, c, g, or t
aaaaagacaaaacaagacaggcacacacacaaaataaaacattaatctgttaacaggtttttgtgtcaagatttgtgataagatttcacatttgatagtcatagaattttagaactgaaagtaatcttagagatagcttagtaaatacaaagctgttagtaatttataaattagcataacttacaatgctgtgtggtttagtggtgttcagtantgtgaaggttatttttcctgtggtattagactactgtactttttgtttccaagataggagtataaaggggttgggaagtattttagagggaaaagtgtaccaaggtgattttatgtggcttcccttagccttgacaccagctggaggagtcaggatctaggagatttgccaggtttgaggtgagact

SEQ ID NO: 331 - DNA, 401 bp, Artificial sequence
  /note="Description of artificial sequence: rs12045973"
  misc_feature (57)..(57): n is a, c, g, or t
  misc_feature (175)..(175): n is a, c, g, or t
  misc_feature (348)..(349): n is a, c, g, or t
cttcccttatttccttcctcccatcttttcttcctcccttcttttttcaccttcttngtattttagacttctggggatctgttttccatctttattccattttgtcccctctactaatttggaagttgtgccctttatttctgtacatattgagtaaccttactggttacttaanggaatctaaagttgatttatgttctcgagccttctcctggacaatacgcggaacttagaacacattaacaccaaccatcccttctcatagtatatatttttgtttcctcgctcgtacttctattacgttttttttaaaatcttaaaaactggtcatttttattgttttaaatnntcatcgtcctctgggaattaccctacatgtttgtcattgcttactgttcatt

SEQ ID NO: 332 - DNA, 401 bp, Artificial sequence
  /note="Description of artificial sequence: rs11589937"
  misc_feature (118)..(118): n is a, c, g, or t
  misc_feature (252)..(252): n is a, c, g, or t
gcagagcagttccgcctgtacctggtttatgcagtgcacttctgaatattgccttcgaggaaaggttaggacaggataaagcctccagacaccaccgttcgagtataatttgagccangaaagctgtcagtgcagctttttactgtgttgtagaatcctttgggaaagaaatcttttcttgggttcctctgagaattccgactgaggcaaaaccagatttatcagggattttgcagatatcctgaaacaaancgtctctcagcgtgagtctaaaactccatccgccaagaccgtcgctgggactaagccctgaagctgagtgatcacttgcttcctctgctcctctctcgtaagaattccttccctcaaaggcctcacaggctagatagggaggcagacac

SEQ ID NO: 333 - DNA, 401 bp, Artificial sequence
  /note="Description of artificial sequence: rs1110128"
  misc_feature (77)..(77): n is a, c, g, or t
  misc_feature (394)..(394): n is a, c, g, or t
tttccttctaaaacactttggtttcagtgttctcttggccatctgtctcacactgagtaagtcatttcacctttccnggactcctgtttatcctctgtgacatgatgagactggactatttgacctcctggacccctgggacactgacagtctctgtttctataatgtctatctgactcctcaagctacaggggtccctgcgtataatccatttattctccttgagccacttctgttttatgaatagcttgaccaagtgacctagtggtcttcacttctgctgtgtatttgctgaactgcaggcaaagaagtcatcgatggccctctagttctctgcacgctgcctagcttttctgtggtataagatcttctatagtccttatttgcagattgntggtcca

SEQ ID NO: 334 - DNA, 401 bp, Artificial sequence
  /note="Description of artificial sequence: rs11583779"
  misc_feature (128)..(128): n is a, c, g, or t
tattgattaggcattatcctatcttcaagaagttcactagttaatggacctttgggtgtggcatataaaggtatgataagtataagggccaaaaagacaccacaaagaacaaaattaggaacaaattntgtattactggccaggcgcagtggctcacacctgtaatcccagcactttgggaggctgaggcgggtggatcaactgagatcggtagttcgagaccagcctgaccaacatggagaaaccctctactaaaaatacaaaattagtcaagcgtggtggtgcatgcctgtaatctcagctactcgggaggctaaggcaggagaatcactagaacctgggagatggagattgcggtgagctgagattgcgccatcgcactccagcctggacaacaagag

SEQ ID NO: 335 - DNA, 401 bp, Artificial sequence
  /note="Description of artificial sequence: rs11584248"
ctaggcttatttcttcatttcagaatctagcctagagattaaaatgttggtttttatccccataattaatttgttgaatcgtcaagaccagaatgaatgaaagtcatttaccttccagtcctatattctttagctacaccacactgtctgccatccatatggaatttgtcctatacccacccaaattcttactgcttcgtctcagaaagtcttgccttcaccatggaactcttctaaccactgtctctattgatctcactcttctttgagctcctacaacactcacaggctaagccacaattgtcctatcaattactttattgcttctcgtagggaactctcccaagtacacagtaggtcacttgaagatagagactgatcctcaatagtattcttgtgat

SEQ ID NO: 336 - DNA, 401 bp, Artificial sequence
  /note="Description of artificial sequence: rs11587158"
ttctttaaaaaatgaacataagccagtattttaaacacagatattttgcattgggaagattttttagatgcacgttttctatctgccatttatttttgttttttctaatctattctacattacttccctgcaggacctgttctttgttctcctcaccctaccccaccactcaatttatcacttgtctttgcacgaagtgaattgtttcaggcgcagccattgttgttgttagtgaggttctttgcggtgcagagttgggtgaaggcagctacaggaggctcaagggcagatcctccttcaccacagagctcacaactatggcaatggctgtgtcctttctcattcacccaaacccactgagtatcccttttccaccagcccacacacctcaccactgctcc

SEQ ID NO: 337 - DNA, 401 bp, Artificial sequence
  /note="Description of artificial sequence: rs11584771"
  misc_feature (177)..(177): n is a, c, g, or t
tggtggcctacaccacacactacaatcaacaagggacatctagatttcagggccaaatccctgcaaagactctgtctgaacatacttttgtgaaagcctgcagaatatagatttctgtgtgtcataaggaaataatcggtccttaaatctcaaagtacaactagctgcagtatttanaaagcccatggacaatgacaaatatagacatcacaaaattattctaaactgatcaatgctgagaaaagtcatgatgtgtcaggagtctcagctccaaaggcagtctgccctttaacataatgaacttcagtaaaagtagaaaccatttctgagggtgtaattgacaagtggcaatgaggtcatcagtagagtttatgacatttaaatccctgtgatatggtttg

SEQ ID NO: 338 - DNA, 401 bp, Artificial sequence
  /note="Description of artificial sequence: rs10926454"
  misc_feature (159)..(159): n is a, c, g, or t
  misc_feature (367)..(367): n is a, c, g, or t
cttgctgacaggtaaccttgggctctgccacaaagtaattttcccatctggactaactggggatcagacagaagattctttttctttcaaggtgtcctagaaaattggggacaccttgtagcaaatcaattaacattttatttgatgtagaaccttacnacaaatagtgagaatttccacaacacaaaaattgtgaagttcttggcaatgcataagaaatgaacattggcagatatgtttcacgtggccaagaacttgatgtttcatcagccatgaggctggtagtgtctctattttacacacgtgaaacatgggctaagtgaggtaaagcaagttgcctgagatcacgtggcttgtgatgagaagnttcaggattcgactccagctctgtgctactccag

SEQ ID NO: 339 - DNA, 401 bp, Artificial sequence
  /note="Description of artificial sequence: rs4525119"
  misc_feature (295)..(295): n is a, c, g, or t
  misc_feature (374)..(374): n is a, c, g, or t
  misc_feature (377)..(377): n is a, c, g, or t
aggagtggtcctctgacacaaatgtgagcaaaatggagactttattttatagactaaactatttctacactggaagaaaacttgtattccaagactgtcctgagactactatgtttgtgattagggactagatacatgaaatttgagtctcacttttctctctatcagtgtgttctgtgcaacatcactgggagaggactcataggagcttgcactgtattccttctgtaattccttccatgtacctttgtccctgtgttaatttcactttattaaaaatatttaggactatatntgtaactataggttgaggtcagtgtgggttaacctgtgcctctgctctcctgactccatggaactttccagagcagtcnacntcattgccaaatctgcaccttcca

SEQ ID NO: 340 - DNA, 401 bp, Artificial sequence
  /note="Description of artificial sequence: rs4881388"
  misc_feature (180)..(180): n is a, c, g, or t
cagcagaaacgctagttttcctcccagaccacatggaggaccaaggaaggttggatttagtggctcttatcgacacattctcgaaaacctgcacccttgcctgtcctcctagaccacaaggaggactgactgagaaaaatcagatttagtggcccttaccgacacattctcaaaaacccnttagagtcctaagcattcaccggttagtattaggactttacccctgtcctgtaaagatgttatgccccaaaaatgaagtgaaggaccttaccctgacggaggtaagggatctccagggttggaagagtgacaccttttgtctttacttatatgaataggaaggatacaatttctgaggctccccacatcctagcttcaggaatagcttttgttaggcctgt

SEQ ID NO: 341 - DNA, 401 bp, Artificial sequence
  /note="Description of artificial sequence: rs2096422"
  misc_feature (31)..(31): n is a, c, g, or t
  misc_feature (272)..(272): n is a, c, g, or t
gtaaaatttgctatagagcatataatggggntacatttctattcattgcttctctactctaaaccatggaaaaagcacttaacaaatgatgcccttctaaaagagtgaaggcctcctggcaatgttctctttaacccatgatgtggattaagaggagtgaatcattgtttgtttgtttgtttgtttgtttttgaatgattattaggcaacatatgtaccattaaagtttcttaagtacattgggcctttgtcctttatctaacaaagtatangtttatccacttataaggctggctgcaaattccttaaacaaaagtacaccccataagtgcacataacagatcccttttccatttctattgttcagagaggcataagcaagaaaaaataataaaagataa

SEQ ID NO: 342 - DNA, 401 bp, Artificial sequence; identical to SEQ ID NO: 59
  /note="Description of artificial sequence: rs4881394"
  misc_feature (60)..(60): n is a, c, g, or t

SEQ ID NO: 343 - DNA, 401 bp, Artificial sequence
  /note="Description of artificial sequence: rs3801058"
tagatgagggtctcagaggtggtgggagcaccccccccacccacagttcctgggcatttctttagagctttaaaatggcacctggagaccaccaggcgcggcgatcagatcgggtggtgtggtgcctcctgggactgaccacttcttgctctccgaccaggcaggggcgagtggcctgggaggttcccggaccctcagggcgcctgtgtctctgggcaccgcagctccgccccactccttcctccagaacattccccactcgggctagagaattgcgtctgctccaggaatgcatcctagcgtgtgtacgatcgcgcctgggtgtcctgttctcatgagcaagcggttttaaccagcagcataatttatactcatagacaggactgggggaagggctgttc

SEQ ID NO: 344 - DNA, 401 bp, Artificial sequence
  /note="Description of artificial sequence: rs4724699"
  misc_feature (106)..(106): n is a, c, g, or t
  misc_feature (124)..(124): n is a, c, g, or t
cgcacaacagcccggggccaggtcctccctctggctccataaatcctccaggcaggaaaaaagacgagaaagagaaaagcgtcaggaaaagcgagagcaaaccgcngctcctcctcctccttcngcgcccagggcgcaaagcagggggcggggcctgcggccggttcccgggagccccagcgccacctgctgggccttggacgcagctgcaaaggccagagctgcagggctgacactgacccctaggcccacacaggtgccctgggctggaaagcccagggaaggccggtcagaccctgtctgcaggtcagctgggacctgcggctcgggccacactgccgtgaccggggccggcgtggagccaggcacaggcactgatgccacgaggaagctgtggtaca

SEQ ID NO: 345 - DNA, 401 bp, Artificial sequence; identical to SEQ ID NO: 2
  /note="Description of artificial sequence: rs4724701"
  misc_feature (93)..(93): n is a, c, g, or t

SEQ ID NO: 346 - DNA, 401 bp, Artificial sequence
  /note="Description of artificial sequence: rs4077245"
  misc_feature (365)..(365): n is a, c, g, or t
agactaccccagagtctggcaagcagggttgtcggcgcccagtggctcgagacgtcctggctgatggctcttctcgcaactctgtgaacagctggggcctccttcctgtcacctctccccacctgcagggacacgaacactcagggcgttcatgtcctgctgcccccttggccgggcgcacgcctctctcaggagccctgatcactccagcagtcagcccgtcctcctgagaggtcttgaaatgcgtcactccccacatcgcctaccaagctccagctctctccaggaatcgcctcctcctaatttgtgttcaattctaggtgctcacctgacttcctgcgcagcagcagagcatcaaactccangatgccctgtcacgaggggaagcggagatgctagct

SEQ ID NO: 347 - DNA, 401 bp, Artificial sequence
  /note="Description of artificial sequence: rs4560713"
  misc_feature (50)..(50): n is a, c, g, or t
  misc_feature (79)..(79): n is a, c, g, or t
  misc_feature (89)..(89): n is a, c, g, or t
  misc_feature (177)..(177): n is a, c, g, or t
tcaccatcctcagaaggaatgaaccatccctgcccatagcctgatttggngcctctgggctccagaatcgtgagacaanaaatgcctgntgcatgaagccactcagtttgtgatcaattgtcctggcagccccaggatcctagcacagatgctgagggcagccacagcagaaggcgncacaggcatggagattcttccctagtaggtgacacaaaaagaccaagtcacggcgggcatggtggctcacacttataatcccagcccttcaggaggccaaggcaggaggatcacttgagcccaggagtttgagaagagcctgggcgacatagtgagagcccagctctacaaaaagtacaaaaattatccagccatggtggcacgcacctgtactcccagctact

SEQ ID NO: 348 - DNA, 401 bp, Artificial sequence
  /note="Description of artificial sequence: rs3801033"
  misc_feature (163)..(163): n is a, c, g, or t
  misc_feature (359)..(359): n is a, c, g, or t
acctgactactgtacttgctatcatgcacattaagtgaaacgatatcaaccgtaacccctataacctgtgctttccctgaacccactgccaaaatatcaacagatcaaatgagaaaaaaatctgagagacaatacttttcaccacctgggatcactatatgcngccaagctaggatgacagtcatctaacaaaaatattccgttgcaggaaaagcaagctatttgttgcacaaggaggttcctaagataagtccaagtagagagttgttctggaggaagtgggtctgcactttacaccttctcatgtcacatcaagctgggagagataggtcatgatctatctcttatccttgccttangctacgatcactgtgtgcctgatcaatgcccagcacatttca

SEQ ID NO: 349 - DNA, 401 bp, Artificial sequence
  /note="Description of artificial sequence: rs3801034"
  misc_feature (239)..(239): n is a, c, g, or t
  misc_feature (397)..(397): n is a, c, g, or t
aacgatatcaaccgtaacccctataacctgtgctttccctgaacccactgccaaaatatcaacagatcaaatgagaaaaaaatctgagagacaatacttttcaccacctgggatcactatatgctgccaagctaggatgacagtcatctaacaaaaatattccgttgcaggaaaagcaagctatttgttgcacaaggagggtcctaagataagtccaagtagagagttgttctggaggnagtgggtctgcactttacaccttctcatgtcacatcaagctgggagagataggtcatgatctatctcttatccttgccttatgctacgatcactgtgtgcctgatcaatgcccagcacatttcacctacagtctccacccttattgtttcactcagtntgct

SEQ ID NO: 350 - DNA, 401 bp, Artificial sequence
  /note="Description of artificial sequence: rs2662090"
  misc_feature (87)..(87): n is a, c, g, or t
cttcaggtggttgaagcttaaatgaggcggacagagatgagctacagagccccaggctgtaatttgcgctaaccagtggatgacctnccaaggcatgagttaggcatttgggattacatcttcaacttcttggagcagtgagacacggtggacagaatatcagcttacccctcagctctgcttttttggggaattcttggacaggagataaaatgagaggacattattgctggaagcatctatagagagcctctaggacagtagttaccaaactgaagtgtgcatttgaaccatctgggaagcttgttaaaaatgcaggttctcagccaggcgcagtggctcatgcctgtaatcccaacactttgggaaccgaggtgtgcagattgcttgagctcgtgagt

SEQ ID NO: 351 - DNA, 401 bp, Artificial sequence
  /note="Description of artificial sequence: rs2670000"
  misc_feature (150)..(150): n is a, c, g, or t
gtgatgattattgaaattttcttgctctagaaaaaaaccagagacagttttattcagtggggtgataagaaaatggctgacagagtcaggtacaagtcccaaggaacaaccttgaaattatgtatatagattatcatgttgaattgtctnaaatttaggtgtgagctttggaaaaaatgccctcaaaaatccaagcaaatggctcttgagttgctagcccttcatgtaaaatcccatgttaattatctttcatttggacagggactgggaggagaaaggagacggggactggggctttagttcaacatgtgtttactgaacatagaatattaggtttgtaagggaccttaaatcttccatgggatgcttgagtcagttcagccacatccctgaccaggggc

SEQ ID NO: 352 - DNA, 401 bp, Artificial sequence
  /note="Description of artificial sequence: rs279558"
  misc_feature (16)..(17): n is a, c, g, or t
  misc_feature (202)..(202): n is a, c, g, or t
ggcctctgggcgccannaaaagaggctggggattaatttcctgcgcgctccacaagaggcggggctgggcggggcgggggcgagagggaacgagggcgcctgcgcggagaggagtgaccatagagtcggtcctccagagacagaggggccggaagttctcttcacggagccgcgcggctgcgggggcgcaaatagggtcacngggccgcttggcggtgtcgttgcggtaccaggtccgcgtgaggggttcgggggttctgggcaggcacaatggcgtctcgagcaggcccgcgagcggccggcaccgacggcagcgactttcagcaccgggagcgcgtcgccatgcactaccagatgaggtatgaagtgaggcgaggagcacggaggctttctcccccgct

SEQ ID NO: 353 - DNA, 401 bp, Artificial sequence
  /note="Description of artificial sequence: rs279553"
  misc_feature (53)..(53): n is a, c, g, or t
  misc_feature (378)..(378): n is a, c, g, or t
tagctaatgttgttgcggggaaaggagagaaggcccaagagagagggcaaaangctcagcaaatacgggtattcccactgatagggcatggccacctgatcatgtgacaagagcctcaggtgtcccacgctcatcttagcaaccagcagcagccatatgaccagatgtacgtagatcagcttcttgatttcatacttgagagtcacactgtggggcagagcagagggagaagtatctttcaaatttttcttaccaccaactatatgccagacaactgtactggacactgggatacaaatttgaataaaacagcctagaagccggacacaaagaacagaggaggaaaaagtaattagaaaatgaagtgaaaaagttctngtaaatatatgttcccagatata

SEQ ID NO: 354 - DNA, 401 bp, Artificial sequence
  /note="Description of artificial sequence: rs279542"
  misc_feature (309)..(309): n is a, c, g, or t
  misc_feature (320)..(320): n is a, c, g, or t
gtgtgttgcttgaaaggtgtggccttagacactaggagatgatgggtagaagctccttgagaaacctagcagtggccatagagaagtagactgggtatggggaacctaagtcatagttgtaacctacagctgattggtaagaactatgggccagacatttaatctctccatctatgaaatagtccattctcatttatctaccttaggttatgggctcttcttttagttggatattcacatttatctttcagtgttaactgggtatcagttatgagtctactactgtataatggcatccaaaagaatttnaaagtacctcngtttatagggatttacaattcagtagaaacttgttattcatgtgaaacagtgaacataatatctaatgatgtggagcaagt

SEQ ID NO: 355 - DNA, 401 bp, Artificial sequence
  /note="Description of artificial sequence: rs33970214"
gggaattccagccaggcattttactaacttttgccttgtgcaagatacctgagcctctgttcttgatctgacacatgggcatcattttagctacccccaggattgttgggaggcttagataatatgtatggacaggctacatagtaggggtttaataagtaacagaatgccttcccttgttgagcagtgttggcttcctcactgagattgggagtctctacctctcagcaataatttcttgcctcagaattctggaggttgatccttctggaagagcagatgtaaagaagggatactcgcccactgttggtgtacattgatctaattggtgggccttcctgcccagggttccctatcagtgagcagagttgccccagtagacgttaggaattggccattac

SEQ ID NO: 356 - DNA, 401 bp, Artificial sequence
  /note="Description of artificial sequence: rs4132218"
  misc_feature (166)..(166): n is a, c, g, or t
tccattggcttgtctcactgccacctcacacgttgggacagtgcccaatgcatggtaataacaacagctatcatttattgattccttagtagtgccacccactgtaccaggagtttagcacacatatctcagttttcacattagtctgtgtattatccccattgtncagatgagaaaaattaagactcagagagtttcttccccaaagacccttcacgggtagaaagtggtagagcctggggctcaaacagatgacatccagtgtcagagtctggactttaataactggtctgcatggcttctacataaccactaaataactattattgttgaaaagatgagtagatgcatatatgctgtcatcattttatcccaataagcttgtcccagtttctttgctt

SEQ ID NO: 357 - DNA, 401 bp, Artificial sequence
  /note="Description of artificial sequence: rs4688898"
  misc_feature (34)..(34): n is a, c, g, or t
  misc_feature (66)..(66): n is a, c, g, or t
atccaggtaaactgctcccaactgctcaagccanagcttcatggtttcaggagtcatgcatcctanaatgtggttcactaaatcacagaagatgtatctcactcttaagcaccttattactcttaaccttaaaaccaactatttattaaataattatttaagataatcatttatccttaattgctacaactgaagtgatacaaaatttaaaacacaatttaagatcactcctaggaataattagttacctaaataatgattactaactgatgtggtttctcacatctttagaaccttggccttaagcagaataatttcacccaagtctccaattttgagaaaacttctagggcagttttcacaaagtatgttgcctaaatggcctgcattcgaatcattaa

SEQ ID NO: 358 - DNA, 401 bp, Artificial sequence
  /note="Description of artificial sequence: rs2203242"
ctgtcagctgaggaatttctcaccctccagtaggcaggtgagccaggctttttcacatgaaggtgattacagaggaaagttcccaagggtagcaagaaggggcaaaacacactgcactggttctttacatgtctccccttgctgatgtcccactggggaaagcaagttacgtggccaagatgaaatttgagggatgagaaaacagaattctcttggatagaagtggcaaagttattttgcaaaagggtatgcatagaggggtgggaggaatttgtggccattttgcaatctaccacaatctatcaagtaccctgataactagaagtgctctcttcatcaatacctttcctaagcaggaatgaagaagacagttttctgatcacctttagcactgccaggtt

SEQ ID NO: 359 - DNA, 401 bp, Artificial sequence
  /note="Description of artificial sequence: rs2286497"
  misc_feature (130)..(130): n is a, c, g, or t
aaaattctggaaatgaggagaaacagactaaagccacgggcaccggatgaatgaagagagagaagagtgctttaggtaagcctctggttagacctaactttaataagctctacttgagaaagggggcacntggcctttcctggggtactatggcttcattcatgtcaccctgaaattgcacagttcctctgagcatagtggtattaattagggtgggaggttaaacaaaataagcaaaattaacaaagcatttgtccttctatgtagcaatgttctagaaaaatcttaatggatttcactaatttaaatgtcacaacacaattaactttgtttttccatctcttctagattgtgggtgcatcctaatttttcttatagttataagttataaaaagtgttga

SEQ ID NO: 360 - DNA, 401 bp, Artificial sequence
  /note="Description of artificial sequence: rs2033670"
ttcattgtaatttcactaacatagatccttaagaagaaaatgcttgctcctgctaatgactatttgaattctaaatggagttcgaataaggaattttaaacctttaagtttgcttaccgaacatggacagcagtaaagttttggtctttcactggactccagaggtcagatagaaagacgagttataaagcagtgtagccacagcttctgcaccacacacaggtgttgctaccatggagcactttgagcggaaagtgctggaggtgcaaatgtttcctgtgggttgtcaaaagagaggccagtagtttctgccacccgtgaccgcccagcacaatatgctctggcaggggccattattagcccataagttgctgcactgagagaaaggcacacggggtgca

SEQ ID NO: 361 - DNA, 401 bp, Artificial sequence; identical to SEQ ID NO: 61
  /note="Description of artificial sequence: rs2270101"
  misc_feature (3)..(3): n is a, c, g, or t
  misc_feature (242)..(242): n is a, c, g, or t

SEQ ID NO: 362 - DNA, 401 bp, Artificial sequence
  /note="Description of artificial sequence: rs2286493"
  misc_feature (6)..(7): n is a, c, g, or t
  misc_feature (58)..(58): n is a, c, g, or t
  misc_feature (244)..(244): n is a, c, g, or t
aatacnnctttgcttctttatgaaagtaccctgggtctttcatccgtattcctgacangagccctgatgtcttaaattctgaaggctcccctgactttatgaagggaagattgtctaggttgcagtaagttgaaatatggttttgttatttcttgattaagattttttccccttggtttgagtcttttttttccctcctcctatttgttattgttgccctaagattgtcagtgacaataaattntgacaggttgtctaatcaagttggttatgtctcatgtgaggttgtaaggtggtttttcttgttttggtttggtttggttttttaatagctcctattttgatggctgtgtgtttggccttcagagtcaaagggagtctgcatgtatgggaactgtttt

SEQ ID NO: 363 - DNA, 401 bp, Artificial sequence
  /note="Description of artificial sequence: rs2286491"
  misc_feature (294)..(294): n is a, c, g, or t
tcttttgcatgaataggagaattctttctaaaaacttaatggggtatggtttatggcatgctttttgtttaatacactataaattactgtcatttaattacagtgaagtatttttgacattttataataaatgttttgatttatcctttgattttctataatctgttgctttataaattatgctaaagcttaatttatgtaaagcataactgatttggtgttaatcatttaaaaagattgcttaaaatacttaatgttaattaatctttgtcatttctttgtttaggaaatacngaattaacaggtcaagaagaactgatggagatatctgaagttgacgagggattttattccagggctgcgtctagtaccagccagtcgggtttatcaaacagtagtca

SEQ ID NO: 364 - DNA, 401 bp, Artificial sequence
  /note="Description of artificial sequence: rs2286490"
  misc_feature (108)..(108): n is a, c, g, or t
  misc_feature (347)..(347): n is a, c, g, or t
gttccttggtaagagctttgattttatactgctttgctactgaaggagagttcacccctagttttactgcgtgatatttctaattgtttcttatcttttgcatgaatnggagaattctttctaaaaacttaatggggtatggtttatggcatgctttttgtttaatacactataaattactgtcatttaattacagtgaactatttttgacattttataataaatgttttgatttatcctttgattttctataatctgttgctttataaattatgctaaagcttaatttatgtaaagcataactgatttggtgttaatcatttaaaaagattgcttaaaatacttantgttaattaatctttgtcatttctttgtttaggaaatacagaattaacaggtca

SEQ ID NO: 365 - DNA, 401 bp, Artificial sequence; identical to SEQ ID NO: 98
  /note="Description of artificial sequence: rs1891877"

SEQ ID NO: 366 - DNA, 401 bp, Artificial sequence; identical to SEQ ID NO: 46
  /note="Description of artificial sequence: rs4795069"
  misc_feature (318)..(318): n is a, c, g, or t
  misc_feature (338)..(338): n is a, c, g, or t

SEQ ID NO: 367 - DNA, 401 bp, Artificial sequence
  /note="Description of artificial sequence: rs4544214"
  misc_feature (218)..(218): n is a, c, g, or t
  misc_feature (395)..(395): n is a, c, g, or t
taaaaatgcattaacgtctttttatatccatcaagggaaggatgaaatgttgaatttgaagactaattcagtaagaagtcctaggggtttaactgtacatactacctgaactggcttttctgagagatgaatcaataatgaaacatgtctgttttaaaaactaccacatgtgactcctatttttgttagctgaaagctgcaatacggagtattacagnaatgtgaaggtgactagcttgaaggtagggtaactagagagccagaaaagttttgttttaaacttgatttaatgcgtttttattttttcttatacaaaatagagataatgttgctaacttcatggaatatttgaggaaatgatatgaaagtgtctggacgtgcagtaacctcatggnttcttc

SEQ ID NO: 368 - DNA, 401 bp, Artificial sequence
  /note="Description of artificial sequence: rs4643284
  misc_feature (7)..(7): n is a, c, g, or t
  misc_feature (24)..(24): n is a, c, g, or t
  misc_feature (242)..(242): n is a, c, g, or t
agctgcnatacggagtattacagnaatgtgaaggtgactagcttgaaggtagggtaactagagagccagaaaagttttgttttaaacttgatttaatgcgtttttattttttcttatacaaaatagagataatgttgctaacttcatggaatatttgaggaaatgatatgaaagtgtctggacgtgcagtaacctcatggcttcttctcactgtcttataaatgtaaataaagatctaatantaatttggttatctaataacaacttaatacatagaacttagtagactgcatggccacattctataatatgatcactaagaacttaatgtaggattttaatagtcatgtttttcttaattgtggcagaatttaaaccttaattttgtgatcttttttagt

SEQ ID NO: 369 - DNA, 401 bp, Artificial sequence
  /note="Description of artificial sequence: rs2440250"
  misc_feature (130)..(131): n is a, c, g, or t
ccactacagacccagctcctagaacaatgcctaatttaaagtcagggttcaataaatacttgttgaatggaagaatgaatgatttctaaatttctaggaaatagaatccactttgctcagcttgggtcanntgttcataacccagttcaatcagttttggccagaggcagaattatatagggccctggtgggaggagaggatgtgtttctcagagaaggaaggaacactgtgactgagaagacacctcaaaaggtgacaaagaagcaatacctaccttgcctcaatggagggctgagtcccctttcgagtgtaacaacatggccctgttagggaaagtgtcgtaaaattgggacaaggtagaggtagttgaacagaaaagtcatcttgatcatattttgcc

SEQ ID NO: 370 - DNA, 401 bp, Artificial sequence
  /note="Description of artificial sequence: rs2473858"
  misc_feature (336)..(336): n is a, c, g, or t
ttcctggctgggctgcttttgaaaacctccccggacttgggtgtgctcctctgtgaaaggaagaggctgatgagccagacccgggagggctgtgaccacattagtgtgctctgaattccagcacctgtcacgcagaggggctgatggcatgtcagcgcctgcttcctgtgcacacctccctcattctacaggccagctggactttttttctcagcaagaaagaccctctgtgaaggcctgaccactttcctatggagatctctgggcatcagccactcacgttaaattcccacgtgagctccttccccaaacaacaagagggcactgcccatcttngcctgttgccttctcttctcgccccctgccacccctatctgactggtggcctcagtttccccaca

SEQ ID NO: 371 - DNA, 401 bp, Artificial sequence
  /note="Description of artificial sequence: rs2070439"
tcagctgcttgggaggctgacatgggaggatcccttgagcccaggagtttgaggttagagtgagctgtggtcgtgcctttgcattccagcctgggcaacaacgagagaccctgtttcaaaaccaaaagggagaatggattaccacaggggctcgacatgatcaagtcagtttagtaggaacgacatgtgaggcatggcccggtcacaggcatgaaggttcagaatatagcctggagtacacatgtatccctctgggccaggcagaggcttcacatcttggtgaaaggcctggtcgcactttctctgggtttcagatggactgttaatgcaaagttgtttttgtgtttttgcaaatcccaggagctggtggatggggatggtgtgaccctgttggaacctgc

SEQ ID NO: 372 - DNA, 401 bp, Artificial sequence
  /note="Description of artificial sequence: rs346457"
  misc_feature (165)..(165): n is a, c, g, or t
aattagagaattcaattctatccaaagactgctggaaaggctttcagataaaaacataagatggcactttgtccaaaaaaaaaagtcaaaaaataaaccagtggagacattcccccttgggtaatagtggattagctaaattgggccaatactttctcacaggtncaactggaaatgctagagacaaaaatttaaaacatctgctcgaaaatattgaagtgctaacatgatagtaaataattatcaggccaaaatgcagagactgacttttagaaatactttcttcctgagggtgacagaaggttgtatatagtaaagttaatcaaaacacgaaaagtaagcaaataacatatataaatcaatgaaatagaaaacaaccataaaacagtgagggtcaacga

SEQ ID NO: 373 - DNA, 401 bp, Artificial sequence
  /note="Description of artificial sequence: rs310095"
  misc_feature (373)..(373): n is a, c, g, or t
ctggtgacagagtgagactacatcaaaaaaaaaaaaaaaaaaaaaaaaaaaaaaagaattcttagtaatctccacaggctgtagttgggactactgtagaactacaccaaggagaacagataaatcatctgtagaatgaaccctatagaaacataatcctggctccatgtagtttagttcctgagtggataaatgtaatgccattctaccaggggatattcaaactcaatctgaaaaagataatatcacccagagctgctacaagtttttatacacaatgtccagcatacagttaaaaaaaaataaggagaaagtatgcaataaaaatcggtcaatagagtaatgacatggacaactgtcattaatattgatnagagataataagatgaagttatttacca

SEQ ID NO: 374 - DNA, 401 bp, Artificial sequence
  /note="Description of artificial sequence: rs310091"
  misc_feature (86)..(86): n is a, c, g, or t
gaacggagaaatccaattctgcaggcttctcctcctgatattgcattttcatcttttaaactttatattagtttcttccaaactcnttctaaagtttctcatttacttatgtcttccaaagtgaatgatgaagaattaaaggagatagaagatgtgaagggcggattcaaactctgttccctgcttttgcagcaacattccccttccatatggccaggataagagcattactctgtttgtctgttgttggtgtataagaatgcttgtgatttttgtacattgattttgtatcctgagactttgctgaagttgcttatcagcttaaggagattttgggctgagacgatggggttttctagataaacaatcatgtcatctgcaaacagggacaatttgacttc

SEQ ID NO: 375 - DNA, 401 bp, Artificial sequence
  /note="Description of artificial sequence: rs310086"
attacatggcaaaggagaattaaggttgtatatggaattggtgggggtagatatggacattatcctggattatcaggatgagccctgtgtaatcataagcattctttcaagtggaagagggaggctagaggaagcatttcagagtaattctatgtgagaaagactctactaggcattgctggcttttaatatggaagggaacaatgaatcaaaaaatatagaaaacttctagaagctgaaaaagcaaaaaaattaaaaaaggatttatctctgaaaacacagccctgctgacaccttgattttaacacagtgatactatctcagacttctgaacccccagaacagtaaattaataaatctgtattgtttcaactcacaaagtctgtagtaatttgtagcag

SEQ ID NO: 376 - DNA, 401 bp, Artificial sequence
  /note="Description of artificial sequence: rs310087"
ttgccatagagtgtgaaagcagtcacagataatatgtaaatgaagaggctgtggctgtattacaaaaaaaaaaaattctcatttacggaagccagtggcagcctggatttggcctgcaggctaaaatttgcagttcactgaccactgatttagacatttcaagtaatcaaagacacatacatggttggttatgtcagatcaatctgaaatccaagccagcatagtataaattagggatttcatatttagatgaagctcaataggcagccaaggcccaaatcttaaaacattattatgatcaattccaaagaatttgaattgtatcaatgagaatttgttactgagtttcaagcagggcaataatacaaacaaatctttatttacagatcaatcacaggagc

SEQ ID NO: 377 - DNA, 401 bp, Artificial sequence
  /note="Description of artificial sequence: rs310089"
ttaaagacaaaaataaacttttgttttttgcatgtctcatggtccctaactatggaaccacatgtcacttttgattatattttgaaaatcctttaaattatttatccatccatacacacgcacacacaataaggtgactcttttgattatgtgagaaatacatagaagctacattgtcctgcattttattgtgaacattcagtgttgcaatccctaaggcagtgctttaaaacagactattttcagagaaaagtctccttaggaattttttaaattaatgtcttctgcataattggtttcatttcagaaaaacattacaaattgtttaatatatctatttttacaaatttacgttgtctacaaagtagcaaaatagagcagaaaaaaatcactgggttggt

SEQ ID NO: 378 - DNA, 401 bp, Artificial sequence
  /note="Description of artificial sequence: rs2228246"
  misc_feature (60)..(60): n is a, c, g, or t
  misc_feature (140)..(140): n is a, c, g, or t
  misc_feature (374)..(374): n is a, c, g, or t
tttgccgagtgtcccttcctgagttccagcagttccttcttgactaccagggggtatggntgggctgacattggcccaggctggtaggttgtggggggctgggctcatccctgactggaggcttctctcatcccctgccntccctaccccatcaggagctgtgggctgttgatcgcctccaggtgcaggagttcatgctcagcttcctccgagaccccttacgagagatcgaggagccatacttcttcctggatgaggtgagcccgatgtttcacccattttttgtcaagagaatgagtaggggtgaccaggaccccacccgggctccaggagctagacgctccttagggatgccaccttgtttctacctactntgcaccttgcccacccccagttgggac

SEQ ID NO: 379 - DNA, 401 bp, Artificial sequence; identical to SEQ ID NO: 29
  /note="Description of artificial sequence: rs2664537"
  misc_feature (206)..(206): n is a, c, g, or t

SEQ ID NO: 380 - DNA, 401 bp, Artificial sequence; identical to SEQ ID NO: 14
  /note="Description of artificial sequence: rs4518023"
  misc_feature (117)..(117): n is a, c, g, or t
  misc_feature (293)..(293): n is a, c, g, or t

SEQ ID NO: 381 - DNA, 401 bp, Artificial sequence
  /note="Description of artificial sequence: rs4810317"
  misc_feature (275)..(275): n is a, c, g, or t
gtccagggtggcagagctcggaggggtcccagggctcaggcagctcaactccccatgggcacactggagggagaggcccagagtgatgccccagaccaggcaggagctgagccacttcctagcatcctgcagccccaggccctggtgaccctgccatggataaccctgggtctgcctcttctgcagggaggtgggtgccactgccagacttcagagtagcaggctctgagcctggctggcccttttgctcaaggcctcctgagtccatatcacanagtcagtgtttgagcacagggttggtttacccagcacttgccttacttggggtgcaggggacctcaagctgtttctcctagtcccactgaggcacaagagaggggctttctgtactgctatctccc

SEQ ID NO: 382 - DNA, 401 bp, Artificial sequence
  /note="Description of artificial sequence: rs4128092"
tgtttatattctgtattctaaaacattatgacatcttttgattttgattttgcttttgctttcctaatttgtgaatgaaataatccagaagaagcttaatgcattttaggaaaaatatactttataaacaataatatttgaaataaaactctgtatttgtagactgtcagctaacatatactatgattttaatgtctttacagaagatatattgataggtgaagccagctggacttcctgggtcaagtggggacttggagaacttttctgtctagctaaagaactgtaaatgcaccaatcaccactctgtaaaaacacaccaatcagcgctctgtgtctagctaaaggattgtaaatgcaccaaacagcactctgtaaaacgcaccattcagtgctctgtg

SEQ ID NO: 383 - DNA, 401 bp, Artificial sequence
  /note="Description of artificial sequence: rs3866730"
aaaatcaaatactgcatgttcttatttgtaaggggaagctaaataatgtgtgcatatggacatggagtatgtaataatagtcattgcagacttcgaagagtgggagggtggaagtagaggaaggataaaaaattacttaatgggcacagtgcacaccattgggttgatgactacattaaaagccaaacttcaccactataaaatatatctatgtcgcaaaattgcactcgtgcctcttaaatttatacaaacttttaaaaacagtatattttaagagatatttcagatctctttttgttattttttatcgtatacatttttccatacttttaatctgattctatttgtgttattgaattgaaagtctctcttttaatttttattttaataaaaagaagaaa

SEQ ID NO: 384 - DNA, 401 bp, Artificial sequence
  /note="Description of artificial sequence: rs4128087"
  misc_feature (400)..(400): n is a, c, g, or t
gaggtactgttcttgcagagcagggctacctcataggcagtgtgctcagagtagcagttcaggagcagctctgcagtcatatttatactcacgtttaattacgtgcaaattaagagtcaggttattcagcatttttcagaagaatggtggcacttctcttcattgccatggaaatcagtggtaacttccttgagtgcccacgtcactggtaaactggacatggcactgatgggcctgtcttatggagaggtgctttcacctcttctctatttcagccagtcttcaatctgatctggagttgaattcctgcctctggaggtgagtcccatcccctacctcaattatactgaaaagacacttgcactcatatgctcaacatcatgctattcacaataacaant

SEQ ID NO: 385 - DNA, 401 bp, Artificial sequence
  /note="Description of artificial sequence: rs2088138"
gtgtcacagacagcccccaccccaagctcccttccaggtatccccataaatcatttgggcacactccctcttggaattgcaatttccatcttccacttatccctaaggagctggccctgtggagaggtgtgttggttgttttgtttttgccaaaggccctcgctctaggtgctcctgtaaaggtaccttggcccctgatacgggatgaatggatgaacgaagccccagatgctccagtgccaaggaggtcagaccgggaacaggcccccactcccacaccctgggatcggagcttgcttggttcttgccatcttgcaggatgacttcgagtctggagggagatacacagtgcctctccatccctggggtggggggaagggattctgctgggactcttgagt

SEQ ID NO: 386 - DNA, 401 bp, Artificial sequence
  /note="Description of artificial sequence: rs4810622"
  misc_feature (305)..(305): n is a, c, g, or t
taaaaacaaatcaagagttgggccagctgcatggaaggacccaagaggattatttaaatggcatgccaaatttcacccatgccacccaatgtcctcaccaaacaggcaacccaacgggagctgttgtcctctggatagccccagatgggtccctaactctagctgctttctcacctgaagatgcagagcacccactgacactcagaggagcttgctctccagaggcccagccatcccccacttctttacaaatgccctcctagctttacttacttattcaacaaacattccagagcatctaccangtgcacagaccaagtaccatagagaaggcaaatcctcataaaacggcctccctgccctcaaggagcttccagtctagattgggagggacaccccca

SEQ ID NO: 387 - DNA, 401 bp, Artificial sequence
  /note="Description of artificial sequence: rs4809630"
  misc_feature (336)..(336): n is a, c, g, or t
cataagccaccaagcctagccagtttttgtttttaatgaaattgattgtcagcttttaaaaactaggagagttcctgtaataatctagagttctgtttttcctgacaattcagtccgacaatgtgggttaagctggcaagagccacatcctttacaaatttcaaaacttcaccttaccccctgacccccaaaaaagctgacgtatccaataggcacaggagacattcaggtatctcagctaagagctcaagctttgcagcagacaggcctgggcctgaaggccaaactctaccacaaaccatggttgatccttgggtaggtaacttgcttctctgngccccagtttacacttctgtgaaacatagatattacctactttaaaggttgttgtaatttttaaa

SEQ ID NO: 388 - DNA, 401 bp, Artificial sequence
  /note="Description of artificial sequence: rs3803941"
  misc_feature (35)..(35): n is a, c, g, or t
ttggggtgtttagttttagtttgtgttacgatctngtgtcaccgagacttgcaaacaatccgcctgtattgtgaattcggtcccagggatgtgctttatttctcctgggttgttttctcttagatgccaactgttgaaatgggggtaaaatgtaacataagaagtctattttgtcttcttctctttaaaatattggaaaacgtggcagtgttgggtccagattcctacatggttgctttggatagcaactgagtagatactgctttctccctttccaccagacgtgagttttctgcttctgcaaagtcccctttgctccccactgctttctaccgggcttcagtttgtggtctgtgaaatctaaaaggccaccttggaggttgggtgcagcggctcacacc

SEQ ID NO: 389 - DNA, 401 bp, Artificial sequence; identical to SEQ ID NO: 32
  /note="Description of artificial sequence: rs2839178"
  misc_feature (328)..(328): n is a, c, g, or t

SEQ ID NO: 390 - DNA, 401 bp, Artificial sequence
  /note="Description of artificial sequence: rs338424"
  misc_feature (60)..(60): n is a, c, g, or t
  misc_feature (378)..(378): n is a, c, g, or t
tttgcctatgacatctgagtgccagactcccaagccatcgattctaattgttccgtgccntttgcctttgtatttaaaaattatataagaataatatattgcccgctgttgaccacaaggccataattcaaatgaagaaatttagtaaaatcacaaaccaggaaagtgcagtgtgtatgaataatggatgaagcgggaacactgaattcaaaatgaaagctgagattctgccggatgttcctgttttgaaaataaaactatttggtagtaagttaataaaaaatgaattctgttcattgtcactcaactattcctagagagggcaagtggcagagattcgagaacctgctgttagtcattttgtgaatacaggaaccngaaaagttagctgctctctcaga

SEQ ID NO: 391 - DNA, 401 bp, Artificial sequence
  /note="Description of artificial sequence: rs2414660"
  misc_feature (60)..(60): n is a, c, g, or t
tagttttattttcaaaacaggaacatccggcagaatctcagctttcattttgaattcagngttcccgcttcatccattattcatacacactgcactttcctggtttgtgattttactaaatttcttcatttgaattatggccttgtggtcaacagcgggcaatatattattcttatataatttttaaatacaaaggcaaacggcacggaacaattagaatcgatggcttgggagtctggcactcagatgtcataggcaaatgctgttttcttgactttaacctatgggttccacttcatgtgggttgtatttttcatacatcaggagtttttataaatttcctattcaatccagcagccctactttgttcgcaaaatataagcaaaacaaatatgtcaggg

SEQ ID NO: 392 - DNA, 401 bp, Artificial sequence
  /note="Description of artificial sequence: rs2054680"
  misc_feature (251)..(251): n is a, c, g, or t
tttaggtgaagttaataggcctcagaattcagtgagttgatggctccatctctggcttaattagacagtttaagctctaattggctggtggtaagtcaatcagttaaagagttgcacattcactccctgggaattgtgggaacgattggtccagggggcaccagacactgcaggagaaatcactcagagcagaacctcccatcgtcccaaagggccatggcaggtgatgtccatcaagggagggtcaagtncgcgggaggctcaaccttttctgtgtgtagagtctgaggaaaagcagatcaccctgtccccagtgctacagaaggaaaacatgttaaacatgttgctcaccaagatggagacagaagtgactgtgaactagaacaaaggctgccttggaa

SEQ ID NO: 393 - DNA, 401 bp, Artificial sequence
  /note="Description of artificial sequence: rs336536"
  misc_feature (12)..(12): n is a, c, g, or t
  misc_feature (41)..(42): n is a, c, g, or t
  misc_feature (51)..(51): n is a, c, g, or t
gagggggaggangaagacgaggaggagggggaggaggaagnngaggagganggggaggaggagaaggcaaccaaaaaaggtggatcatcatgaaattaaagtcccatgctgaaaactaagtactctgaagagcactggtttttttaactgataaatgttcttacatacatttttcaaccttctttattcaccattacacgatttcatccaatgattccatgtttcttttcctttaagaactccgggtataactgatgtaattttagagttcatgcctctctcccttcaaaacagactagcaatgactagcaatactctaaaggttgaaataattgtgccaagaagaggacacagcagaggcaaattgtccccattccaaaagcagctaaagctataaacag

SEQ ID NO: 394 - DNA, 401 bp, Artificial sequence
  /note="Description of artificial sequence: rs336528"
ttataagttgtggcattttaagagtccacagataaataccaaaacagaatttctgagtttgatgggagagtaatctgaatttgctgagttttgattttagaagaaatagtgtggaagctgaattaaaatgtgagtgagaaactgaaagcctatatacattacttcatattattcctcaaaattcaaactgagatctttcacgacatgtattagatatgtatcattcaataactactgaaaaactaaaaatggattcaataattgtttgtagcattcttgactgaccattccccaactcttaacattacatcatatacctagactaatagcttttgagtgaattgagaaaggcaactgtctaactatttaaatattttataggtattaattaatataggtaa

SEQ ID NO: 395 - DNA, 401 bp, Artificial sequence
  /note="Description of artificial sequence: rs338446"
  misc_feature (380)..(380): n is a, c, g, or t
aattttttatgtagaagagaccaaatcttcagaaacccaattactacctatttagttatgaaaagtcatttatcctttgctttttagcatttcttaggaggtagggaaggtgaggatatattaaacacagtttcttctttctgaggtttctcattgtttttagcaactaaaaccatgggattttagactaagatcttagacatcatttgcccagagcatttcaaactgtttgtggcagcagaatccctttttttccccaaataccatctttgtatatacaaccaatatattgacacagataaaagcagacccttctgatggagggggctgaggcactgccacagaacccgttttctgaaaaccactgtgttcatcaaagngtttattaaacagctggagga

SEQ ID NO: 396 - DNA, 401 bp, Artificial sequence
  /note="Description of artificial sequence: rs2136559"
  misc_feature (37)..(37): n is a, c, g, or t
  misc_feature (53)..(53): n is a, c, g, or t
  misc_feature (62)..(62): n is a, c, g, or t
  misc_feature (232)..(232): n is a, c, g, or t
  misc_feature (273)..(273): n is a, c, g, or t
  misc_feature (387)..(387): n is a, c, g, or t
ttatttcatcttatttttttcttcttggctcatggangatatggagcagagangagaagctnatataataattggagaatcaggtctttggtgaccaaactctaaggcttctttctggatagtaggactttgctggcttcttgcagggcgtaaaggttaagcttgtgagcttttggggtcagatttgccttggttcaaatacccgctccacaacatagctattgtgtggagnttggtaagctacttagctcctcttaagcctcagtttacacngtgaaaaaaggggaaggcgtagccataatacctatatcatgagattcttatgaaacacatgtaaaacattcggaaccatgcttggcccatcatcaatactcaaaaaagttattnatttaaaagacata

SEQ ID NO: 397 - DNA, 401 bp, Artificial sequence
  /note="Description of artificial sequence: rs4775243"
  misc_feature (122)..(122): n is a, c, g, or t
ccatctgcagaggcaaaacctgagccgaggcaaggaaagtgactttctcaaggtctcacaataatcaggggcagagacaggccccaccgacagcccctgattctaggcctcctgttgtttcngggaaattaagcccagtcccagagaataataataaatttggcccctgcaaactgcctgtctacctagctcacccttgtaaatagaggagaaaagccaagaccgttggcaaaaaggacctagggaatttgggagtgtgcctaataagaggaagctgaactcaccttgcttgctagatcccacagccctctctttcactaaaaccatgcctgcctcatccaggaagcccaccaggctagtttcacctacttctgaccactcacagcatcccaattcttcca

SEQ ID NO: 398 - DNA, 401 bp, Artificial sequence
  /note="Description of artificial sequence: rs2136557"
  misc_feature (136)..(136): n is a, c, g, or t
ttattacagtggcagctcttctacaaaccaggctaagaggctcggagttcatcagtcccctccctacccccaccatcagctcaactgctctaagaatttgggcaaacagatttttgggggaaagcaagggagtttngctttttccgtcacttagtcccataagctacatggccctccagaggctagaaggaccccttattcacagaggaaacagaagacaatgcatgcacccccaataggctttaaatgacactctatacacttccatggagaatcttcaacttaaaaaatcaatggcaaaagaaccctaacccatgctgccaattagacgagacggaggagtctggaatacaaagcaacagtgaccccagtctggctccagggaatggctaggctaaccc

SEQ ID NO: 399 - DNA, 401 bp, Artificial sequence
  /note="Description of artificial sequence: rs256353"
ggctaatataggaagtatttttaaaagaagataatgcatccattagaatagaaatatcagctgtaaagtgttcaaaaacactgggttttaaaaataaaatccgtaaccggggtaagggctgcaagttttcaacctctgccttaactcatcaggataattctccataaaatttgagaaatggcagaacctatttcgttgacagaggtggtgacatgacaacaggaatatgaactccatgggtgagagatggaagggaatacccaggcacacaaggctgctcaaggaaagacaattgagctgccttttcatacaactcggcgctgtgaggaggaagtgttttctagtgtccagaatatgaaacctgtaaaaattgtttttttacagatatacaactgtttaaa

SEQ ID NO: 400 - DNA, 401 bp, Artificial sequence
  /note="Description of artificial sequence: rs256348"
catagtctttccttgcaggaaattattcctaatttggaaatgaaggttctttcacaaatcagcaagttttttgcaataaaaagctacttaccaactctgcaaacttggatatagtcaaatcattttttccaactttttattgtggtaaaaatacacataaaatttactatcttaacaatttgataatcataatttttggtaaacagaatttggaatctgagataataatcatgactgtatagaccctgcatagtaatggttcaattgaacttagttctagttctttctcctcccttttgctaacagtgaaacatcaaacaatattcatcttgcccattaatattgaagtaaaacttgctgaggcagtttggtctcagggagtgtgcacatttaaataccaa

SEQ ID NO: 401 - DNA, 401 bp, Artificial sequence
  /note="Description of artificial sequence: rs2081692"
ccttgccttagaagaaaacctaggcaataccactcaggacataggcatgggcaaagacttcatgactaaaacaccaaaagcaatggcaacaaaagccaaaattgacaaatgggatctaattaaactaaagagcttctgcacagcaaaagaaactagcatcagagtgaacaggcagtctacggaataggagaaaattgttgaaatccactcacctgacaaagggctaatatccagaatctacaaagaacttaaacaaatttacaggaaaaaaaaaacaaccccatcaaaaagtgggcgaaggatatgagcagacacttctcaaaacaagacatttatgcgaccaacagacacaagaaaaaatgctcatcatcactgctgattagagaagtgcatatcaaaac

SEQ ID NO: 402 - DNA, 401 bp, Artificial sequence
  /note="Description of artificial sequence: rs2101237"
  misc_feature (1)..(1): n is a, c, g, or t
  misc_feature (401)..(401): n is a, c, g, or t
ntgttgctctttttgttgggttatctctttttcttatttgtaagaaaataagagaattttatataaatgggtaggagtcctttgttaagcaggtgccattgcaaatattttctcctagacctggcttgccttttgacattccatgtggtttgtttgtttgataaacataagttctcaattttattaaactccaattcataagtatattcctttttggtaagtactttgttgtctttttaagaaatctttgcatactccaaggtatcagaaattttctgttttctcctaaagctttattgtcttaccattcacatttagatcaacaatccagctggatttatttttttagtttagtgtaaggaaggctcaagatcaagatacattttttccatgtggatatn

SEQ ID NO: 403 - DNA, 401 bp, Artificial sequence
  /note="Description of artificial sequence: rs2086784"
  misc_feature (401)..(401): n is a, c, g, or t
tgtaaatgacgagctaacaggtacagtaacaccaacttggcacatgtatacatatgtgacaaacctgtacgttgtgcatatgtaccatagaacttaaagtataataaaaaataaaaagtaaataaacaaaagaaaataaacagaaacaaatgaattaaatgaatgatatcctctttggtaaagcacctgttaaatcttgcctgttgctctttttgttgggttatctctttttcttatttgtaagaaaataagagaattttatataaatgggtaggagtcctttgttaagcaggtgccattgcaaatattttctcctagacctggcttgccttttgacattccatgtggtttgtttgtttgataaacataagttctcaattttattaaactccaattcatan

SEQ ID NO: 404 - DNA, 401 bp, Artificial sequence
  /note="Description of artificial sequence: rs2393422"
  misc_feature (302)..(302): n is a, c, g, or t
  misc_feature (388)..(388): n is a, c, g, or t
aggatatccatcacccaaataacgtactttgtacccattaagtgatttccaattatccatccccttccactccttcactcttctgagtctccattgtctatcatttccctctctacttacatatacaccttttctggcactcatttataagtgagaacatgcaatatttatatttctgtgtctggcttgtttcatttatgacaatgccctcctgttccatccaagttcctgcaaaagacatgatttcatgtttttatggctgaatagtactttattctttatatataccacattttctttanccagtcacctgctgatggaaactaggttgcttccatatctttgctattgtgagtagttgataaacatacaagtgcaggtatctttntgatatattgatt

SEQ ID NO: 405 - DNA, 401 bp, Artificial sequence
  /note="Description of artificial sequence: rs4948298"
  misc_feature (264)..(264): n is a, c, g, or t
  misc_feature (313)..(313): n is a, c, g, or t
  misc_feature (316)..(316): n is a, c, g, or t
  misc_feature (334)..(334): n is a, c, g, or t
tccctcccaaaaatcctaagattttaattgaactacattgacactagattaatttgtggggaattgcaatatttataatattgagtcttccaatcaatgtacagtaaatttctatatttgtttaggtctcctttaattttccttgttataattttatagttcttgccatacaactcttgtattacaactcttgcaatacaacacttaaattacagttaattctagttatgtaatatgtttgatattacaataaatggcataatnttttcaattttgttttctaaatgttgcttatatatagaaataaattatnaantgatttatttagtagacntctaaactgaattaataatttatctgaattattttgtactttttataaacataatcatatcacctgc

SEQ ID NO: 406 - DNA, 401 bp, Artificial sequence
  /note="Description of artificial sequence: rs4948299"
  misc_feature (138)..(138): n is a, c, g, or t
  misc_feature (250)..(250): n is a, c, g, or t
  misc_feature (253)..(253): n is a, c, g, or t
  misc_feature (271)..(271): n is a, c, g, or t
ttgcaatatttataatattgagtcttccaatcaatgtacagtaaatttctatatttgtttaggtctcctttaattttccttgttataattttatagttcttgccatacaactcttgtattacaactcttgcaatacancacttaaattacagttaattctagttatgtaatatgtttgatattacaataaatggcataatcttttcaattttgttttctaaatgttgcttatatatagaaataaattatnaantgatttatttagtagacntctaaactgaattaataatttatctgaattattttgtactttttataaacataatcatatcacctgcaaatgatgctatttatattttgcatttaatttttatatatctttttttttaccttgttttact

SEQ ID NO: 407 - DNA, 401 bp, Artificial sequence
  /note="Description of artificial sequence: rs4948513"
  misc_feature (68)..(68): n is a, c, g, or t
  misc_feature (131)..(131): n is a, c, g, or t
  misc_feature (180)..(180): n is a, c, g, or t
  misc_feature (183)..(183): n is a, c, g, or t
taattttccttgttataattttatagttcttgccatacaactcttgtattacaactcttgcaatacancacttaaattacagttaattctagttatgtaatatgtttgatattacaataaatggcataatnttttcaattttgttttctaaatgttgcttatatatagaaataaattatnaantgatttatttagtagacgtctaaactgaattaataatttatctgaattattttgtactttttataaacataatcatatcacctgcaaatgatgctatttatattttgcatttaatttttatatatctttttttttaccttgttttactgttttgtctaggttccctaaggcaatgttgactagaagtgggatagtaacaccttttttttgttccttat

SEQ ID NO: 408 - DNA, 401 bp, Artificial sequence
  /note="Description of artificial sequence: rs2893777"
  misc_feature (16)..(16): n is a, c, g, or t
  misc_feature (34)..(34): n is a, c, g, or t
  misc_feature (68)..(68): n is a, c, g, or t
cagggaggctgaggcnggagaatcgcttgaaccntaaggcagaggttgcagcgagccgagatcatgcnattgcactccagcctgggtgacacagtgagactgtctcaaaaaaaaaaaaaaattacattaccattttgctatgttggttgattcaggttgtcgctttagtgggattttaagagtgagtgaaagtaggttcacgttttcaatctgccatctttacttccatgttagtactaaataatttttttgccagctgatttactatattggcaccttcactccattctagtattccttgccacctttctctctcctaaatcctggtactgctaattgcattgtcttttggttgaaaatgtaacatgaatattccaagcactgtacttatactacattgc

SEQ ID NO: 409 - DNA, 401 bp, Artificial sequence
  /note="Description of artificial sequence: rs2114562"
  misc_feature (47)..(47): n is a, c, g, or t
  misc_feature (238)..(238): n is a, c, g, or t
  misc_feature (319)..(319): n is a, c, g, or t
tttattattaaagagatagcatattgtatgcacactctatattttgntttaactcttaaaaatatatttaaatttatcaatttacaattttatgtttagtattctcttattttttgtttaagaattctttacctgcccaaagatcacaaaaattttccactatattgtcctctaaaatttttaaaaatcttgcctcttacagttcagcttttaatctctctagagacaattttgtgtntgatatgaggggggtacccattccatttttaaaatgagtttccatttatctcatacactttgtcaaacagtctattctttncccagtgatatttggtgtcggttcagctctacatcaagtttccacacattcatggatctgcttctggactttctattctgtt

SEQ ID NO: 410 - DNA, 401 bp, Artificial sequence
  /note="Description of artificial sequence: rs2114563"
  misc_feature (10)..(10): n is a, c, g, or t
  misc_feature (164)..(164): n is a, c, g, or t
  misc_feature (282)..(282): n is a, c, g, or t
tatattttgntttaactcttaaaaatatatttaaatttatcaatttacaattttatgtttagtattctcttattttttgtttaagaattctttacctgcccaaagatcacaaaaattttccactatattgtcctctaaaatttttaaaaatcttgcctcttacngttcagcttttaatctctctagagacaattttgtgtatgatatgaggggggtacccattccatttttaaaatgagtttccatttatctcatacactttgtcaaacagtctattctttncccagtgatatttggtgtcggttcagctctacatcaagtttccacacattcatggatctgcttctggactttctattctgttttatttgttactccgtctattcctgagaaaatcttct

SEQ ID NO: 411 - DNA, 401 bp, Artificial sequence
  /note="Description of artificial sequence: rs2128909"
  misc_feature (3)..(3): n is a, c, g, or t
  misc_feature (64)..(64): n is a, c, g, or t
  misc_feature (281)..(281): n is a, c, g, or t
  misc_feature (301)..(301): n is a, c, g, or t
tanattgtggactactacacagccataaaaaataatgagattgtgtcttttgcagcaacatagntggagctggaggccatcatcctaagtgaacaaacacaggaacagaaaatcaaatgttgcatgttctcacttataagtgggagctaaacattaaatacatatggacacaagggaacaacaaacactggagcctattgcggggtggagggtggagtgtgggaggacctgggtgatgaactaatctgtacaccaacctccatggcacacaatttatatancaaacctgcacgcgtacccngcacctaaaatgaaagttaataacataaaaatatgtctgaaagttttagacagaagattttctcaggaatagacggagtaacaaataaaacagaatagaa

SEQ ID NO: 412 - DNA, 401 bp, Artificial sequence
  /note="Description of artificial sequence: rs4948301"
gcaacaacagggtattgaactattagaaaataccatttgggtatttcgatgagaagaatggaatctgtgaagatgctaaacaaagaccataaattccatacggtttgggcagataaagaagtagtaaaacctatattctaaattctaagccaaccattcctgggcagtgaccactggaagctggacctcaaagcctgaagcctggatgtcaaaacctatcacttcccatacagctcattctaggtagcagaaatacaaaatatttaaatgtcagttattctgttttatattttgaaaaagagttttggaaagttacacagcttgaatttaaatccaggacttccattatatgctaccttgaagaaaacagatggtagagaggggagggaaaggcattccag

SEQ ID NO: 413 - DNA, 401 bp, Artificial sequence
  /note="Description of artificial sequence: rs1896248"
ataattattcatgttatttgtgtatctgttattttcccactgagaaaccagttcctaagaaccagatggcattaaccatggtattcttcatatcacctggcaaagcaaccgcttatagaagacacttaacaaagttttgtgaatccagaagttgaggtcaaagggagcagggaaaaggcaggaggcttttggaatcatgggtccctctcctctttgggcaggtactagtttaatgataaaccagttctctggatgggagagagggaagccctgatttgtagtgtttactgatttccatggtgtaaatactcacacatgggcaatttcaagcttccaatgttacatcattgaatatagagtttagaaaaagtgcttgtaattgattctcatgagctggtaca

SEQ ID NO: 414 - DNA, 401 bp, Artificial sequence
  /note="Description of artificial sequence: rs2114561"
  misc_feature (12)..(12): n is a, c, g, or t
atctgagggtcntagtgattattggaagagtcatttgaagacaaatttacatgattggaagaatgatcaagctgagtacctccatttgtttttctttattttaaagtcattcctataaagtttaaagactttttcatgtttctctggtgttttcaaaatttttgatgtgtacgtttacagaaggagaggaataaatttcactattttggagcaacatttctcaaagtgcgttctatagcacagcagatactggaaatgccctccagaaagagagttctctgatcaaaggagtttggaataaactacacactccatctagttccttaaagactcacaaagaacactgaatatattaaaagctctgagatttctccacaaataaagccctttaactttaatta

SEQ ID NO: 415 - DNA, 401 bp, Artificial sequence
  /note="Description of artificial sequence: rs357003"
acacacacacacacacacacacaaatgttacctggaagatcaaaaggtggatgctaaaaggtggcatccacctcagattttagaaaacagtcacataattgcattgcttattggaaagattcaatacactagaccaaggaacctataagaaggtatacatgtttattttcaataaaaataaatggaagtcgttgattggtctacattcttggaggagacaggtgacgaggcattcttgaggtaccagaaccctgatgattgctgctgcaggtaacttgtgaattttatgttcaacttttgctctgatgatgagtgagaagttggcttgccaccaagacattccaactcatgaaaaaacacttctaattccccagtgtctctacccaggactgtcttgcatc

SEQ ID NO: 416 - DNA, 401 bp, Artificial sequence
  /note="Description of artificial sequence: rs357002"
  misc_feature (281)..(281): n is a, c, g, or t
caaaggatgcttggtcaggaagggttttttgttttgttttgttttttgtttttagcttgaatgacccagttcagcaggtgaggttttgcagtcttggtgaggacagaaaatgtcttcgttgtcctgattcagttggccaaactcttcttaccatagagtaaattcctctaactatgtttgtctctgaaaatgctcaccccagaaagatagcagaaaagtagcatttaccctctggcttattttagaagccatgggtagagttgaagctctcagaaatgacnctctgtgtccttccaacccaatcttctctcctaaacactccaccccatcctctaaccgaagtccaaagtactccaacaaatttaacctagagccatgtaccaagttagaattgattacat

SEQ ID NO: 417 - DNA, 401 bp, Artificial sequence
  /note="Description of artificial sequence: rs356999"
  misc_feature (9)..(9): n is a, c, g, or t
  misc_feature (66)..(66): n is a, c, g, or t
aggcctaangcctgactgacaagcagctgtttgaaggacactgtccatccaaacatggattgtacngtggacatactgtcttctctggagttacagagggagttgggttcattgccaccctcattaggtcacagaaatcccaataagataaaatggaagatgctaccctgcctgaaagtgcccagcatggtgcaggatgccgatgggtactcaataaatggactgcaggttgacttagtcccccttcccaagtgggcagtttagattctaagtactttccagttggctgagcagtttttcccaagaagtaggctccttactgttcctgatttcttttgtctatcccatcagaagcaggacaatcaaggcaggtctaagagagaactcatggcaggagcaga

SEQ ID NO: 418 - DNA, 401 bp, Artificial sequence
  /note="Description of artificial sequence: rs356998"
  misc_feature (144)..(144): n is a, c, g, or t
  misc_feature (336)..(336): n is a, c, g, or t
tggcgccaatcttctcttttgaggggagagaagggaaggtggtgtagggggtagttaaggaactggaggatatctttggctcctgacacggccaataagcctcagctgaggcaagaggcatctacttgcttaccaaggcctaangcctgactgacaagcagctgtttgaaggacactgtccatccaaacatggattgtaccgtggacatactgtcttctctggagttacagagggagttgggttcattgccaccctcattaggtcacagaaatcccaataagataaaatggaagatgctaccctgcctgaaagtgcccagcatggtgcaggatgcngatgggtactcaataaatggactgcaggttgacttagtcccccttcccaagtgggcagtttagat

SEQ ID NO: 419 - DNA, 401 bp, Artificial sequence; identical to SEQ ID NO: 95
  /note="Description of artificial sequence: rs4939517"
  misc_feature (79)..(79): n is a, c, g, or t

SEQ ID NO: 420 - DNA, 401 bp, Artificial sequence
  /note="Description of artificial sequence: rs3741265"
  misc_feature (83)..(83): n is a, c, g, or t
  misc_feature (212)..(212): n is a, c, g, or t
tagtgatgagaaatggtccctcagcagcagtacctggagaaagcagccaaggtgagcacctcaagtaaaagctctgagccacngaagaagagcaagatgccattcatgatggcttccaggcggagtacgtaggtctgcagcagcaggtaataggaggccatcatggcagatgggaaggtcaaggccacgctaatactgagcggcatctttcnctggcagaggtttccctttgtacctgtcagacacagcccatggagtcatctccaaatggtctgcttttcctggcccaggggaaaggcgtgggagatgtgatggaatggcaaggcacaaaaaataatcctgagtgggggtgtgcagatttataaatggggtcccactgtactaaaagtttgaggcttagg

SEQ ID NO: 421 - DNA, 401 bp, Artificial sequence
  /note="Description of artificial sequence: rs3018727"
  misc_feature (320)..(320): n is a, c, g, or t
caagcagcactcttccagggatagggagtggggacaaatggagcccagggaatctgggaaagacctggccgaaagtctggacgttagccttcatgtctttttggggaagaaactaatcagatgctttcattaataagtgttgtaacatctggaatctggtgggtgaggcagtgggctcatgtaggaaaaaatacagacagatatttttaagaacatgggttttggagccctacaagcttggattggaatcccagttctgctgctaactatctgtatgaccttcttgtgtatggaagttagtcaactttccaagccttatntttctcattttctaaaaaagggacactgatagtatttatcttacagacctgttgtaaagattaggtcagataatccataca

SEQ ID NO: 422 - DNA, 401 bp, Artificial sequence
  /note="Description of artificial sequence: rs3019198"
  misc_feature (41)..(41): n is a, c, g, or t
gcctgagttctccttttggtccagttagtttaccatctctnctcacccttggcctttctccttcatcctttatcaggggattacagtgacgcaattgagacgctgctcacagccattgcggttatcaaacagtcccgggttgccaatgatgagcgttgccgtgtcctcatctcctctcttaaggactgtcttcatggcatcgaagccaagtcctacagtgtgggtgccagtgggagctcttccaggtgagttggtgattgtgtcctcacctaccagccccaagcagcactcttccagggatagggagtggggacaaatggagcccagggaatctgggaaagacctggccgaaagtctggacgttagccttcatgtctttttggggaagaaactaatcagat

SEQ ID NO: 423 - DNA, 401 bp, Artificial sequence
  /note="Description of artificial sequence: rs2860519"
  misc_feature (98)..(98): n is a, c, g, or t
taaaagagacaaggcagatgttgcaagtgtaaaactggatgacacctatattccagcagttcggaatttaacagatgttgtcagatgaacaaactganacactgttgtccaggggctatttgacatctattaaaataaacaatgtgcatattttttgagccagcaattctattaaaaattttctacttctgttcacaagtatgtatgtttaacagtgttttagtgtttattttttttcattttttttttttttgagacagtctcactctgttgcccaggctggagtgcagtggccgtgatctcggctcactgcaagctccgcctcccaggttcacgccatcctcctgcctcagcctcctgagtagctgggactacaggcgcctgccaccacacccagctaa

SEQ ID NO: 424 - DNA, 401 bp, Artificial sequence
  /note="Description of artificial sequence: rs3809083"
  misc_feature (248)..(248): n is a, c, g, or t
ggaaagagtgctccttaaactagaatatgatagttaatcccagctcctgagtaaagcctaaggtggaatcaattatgttgacaaccacctagatttctcttacagaacagtgccagtgctgtcttgttcttcaggtctcaaacacatggcaactggctctttcctagagttctctcaaactgaagaacaaaaaggtataacgcaagtgtcatctgacagttaaccactttcccagctactactgttgncacatctgcaaaggttgttttgtatctatggctacaagtcccaaaagacgcaacatttctatgcagaggaagtccaccagctttacttagtgaattaacagagcccaggtccatcagcatgacagagcagaaaaacagcactcagttacacaa

SEQ ID NO: 425 - DNA, 401 bp, Artificial sequence
  /note="Description of artificial sequence: rs2943807"
ctttatgttaatttgaagctccaggcttaattttaaaggctttgatttaagagcaaataaaaagcaggtgtaatagaatggtgaatcaacctgtggaatttactccccaggaagccaaaggtgggtgtcagactaaccacacttaaaaatcaaaagtacatttgctacggtattcatgaggacagtgttgataccggttcctttacattctcaacctgcagctggagaagtgtagtcccctccatcgtgacagtgcaaaagcaaagtagaaaagatgactttaacatttagtttcaactccattccaattaagttttacttccttttataagtaggttgactccagtcatgagaagtccacaggcattttggtataataaattgtattggttacctttagt

SEQ ID NO: 426 - DNA, 401 bp, Artificial sequence
  /note="Description of artificial sequence: rs2943806"
  misc_feature (105)..(105): n is a, c, g, or t
ccggcaaatccctctaaatgggaatttacatccgcaagtccagaaaagacacatcctcagtaaaggattgagaggcccttggaatctctatccatgctgactagngaaggccaatcaccagtacaaagaccaggagagacagatgatttttcaaatgtagaaatcaccagtacaagttaccaagcacatgaataaagaggaaaacatggtcctattaaaggaacgaaatacatctccagaaactaaccttaaagaaacagaagtatatgaatcacctataaagaattcaaactagccataataaagatgttcaatgagctttggaacattgagaacttgaacattgagcttgaacaaaatgagaaaaccaaaaaaaagacagaaaacattaaaaaataacc

SEQ ID NO: 427 - DNA, 401 bp, Artificial sequence
  /note="Description of artificial sequence: rs3017602"
gagtaaaaaaacatccaaaacagtaatggcttaaacaaggtagaactgtctttctcatgacagaagtccagaggaaggcacactccagagctcatagaggggcttcaaaaagtcatgggtccaggtcccccctacttgctgctctttcatcctagcatgtgttttctacttcttgatccaggacagccatatttcagcccagaaaaagtgtgtggaagtgcatacccctcctttgtagatcccgctcaggaaattatccagcatacttccacttatttgccattggccacagcttagttacttggctacgtctaaccataaggaaaaataatatagtctattccatctgcccagctgtgttggagattctgttatcgatgaaaactggatattaggggacg

SEQ ID NO: 428 - DNA, 401 bp, Artificial sequence
  /note="Description of artificial sequence: rs2943805"
aggcatgagctaccacacctggccctattataaagttaaacatatacacttaccacatgacccagcaaatccttctcctgagtattcactcaagaaaaactaaaacctatgttcacaaaatctgtatgcaaatgtttacagtggcttcatttataatcacctaaagctggaaataatcctaatgtccctcagctggtcaaaagatgaacagaccatggtacatccacacaatggaatattactcaacacaaaagaatgaactattgatacaagtaacaacaaggatacgcatctcaaatgcattatgctaagtcagggcaaacttgttctgtaaagggttggagagtaaatatttggactttgttggctttccagtgattgtataaggctccagactctgt

SEQ ID NO: 429 - DNA, 401 bp, Artificial sequence
  /note="Description of artificial sequence: rs3018729"
gaaaagtcacaggtttgagtaatgggtgggaggtttgacccagtcattgtggaacatgaaagagcagattggccaaagacatacagcatgtgcaaaggccctgcagcaggaggaattctgcaaagggtgaggttgaaagactgaccatcttagaggctggagcacagaaactgagtgcctggccaagatgaggtctgatacactgagatgtgccagcgatatcctatgagcctgctacactgagaggtgctaggtgctaatcaggatcgaatagacaatgatgaggaaatgaataaagcatgaaatcccccttgacttaacacagtaaaggcttctcattcacaagcagtttgcaagagattaggtggccctcctccttcgtgtgccacattgtctggacg

SEQ ID NO: 430 - DNA, 401 bp, Artificial sequence
  /note="Description of artificial sequence: rs2924436"
  misc_feature (331)..(331): n is a, c, g, or t
ttgcctctaaccaattatggacacctccccttcccttgattttcatgattctgtttccttctgcctctccagccatgcttctgcctctgtgaggcacgccgtcctcttcccagtcattctgtttgtagttcttcacagtgctcttctaggagcctcctctctcctctggatactctctctagtgatctcacccataccggggtacccatcaccacctatgtgtggacagttctcacatcttcctctaagctccagcttgcatatctaactgccaacttgactcctcctttgaaggaggctgaaaaacccttcaaactcagccaggctaccntccctccctgttctactcaccaaaaactccctcatcttgagagcctcagtgaatggcatcaccagtcatc

SEQ ID NO: 431 - DNA, 401 bp, Artificial sequence
  /note="Description of artificial sequence: rs3019186"
  misc_feature (65)..(65): n is a, c, g, or t
cttgcaggctttggagtcagccagacctgcatttgaatcttactcatctgctttttgttttgtgnctttatttgtgtgtgtgtgtgtgtgtgtgtgtgtgtcagagagagactgttctaagcaagcacattacatggaagtaactggaattggaactcaggcacgttggcctccagtaagcatgcttgtactgttaccctacacggcccttaggttagcacagagagattatttatttattaaaaaaaaatttttttttgagatggggtctcactctgtcacctaggttggtgtgtagtgctacagtctcagctcactgcaacctctatctcccaggctcaagcaatcctaccacctcagcctcccaagtagctgggaccataggcgcacaccaccacacc

SEQ ID NO: 432 - DNA, 401 bp, Artificial sequence
  /note="Description of artificial sequence: rs2943800"
cttcctctctttgagcctgtttctgtacctgcaggcagggataactgtgcctacctagcagggtcgctggtggatttgaaataccctatgcacaagaggtaacaggcctgcaccaggcagagataaggaagggccctctacgtggaaagcccgacaaacacaaaggcggagacaggtgtccagcaggctgggagccctgaatagtgcagcgtggctggagcactgcgtggggaggagaggctcagctgggagaagcagcccccaggtaggctgtagccaggttttccttttagcaggtggagggggcaaggaggggtggtagaaaggtttgaaatcatcccttagggcttctcttagggaggctctaggctgtagccgaccaaggacctgggcaggagttc

SEQ ID NO: 433 - DNA, 401 bp, Artificial sequence
  /note="Description of artificial sequence: rs2957860"
  misc_feature (192)..(192): n is a, c, g, or t
aagacagtgcatgttccttgtgcctcagtttccccttctggagaatgagtataataatggtaactacctgcagggttgtggtacgcacgaagcatttagcccagtacctggcacacggtaggtgccatctaagagctagggaaagaggttccttttgagtactcactgcctgctaggcaaagggttgggccnaagggttacaaacaggaaatccacatggccctggcctcagagagcccacggtttaggaaggatctcagatgtagcaaaagaaagctcactgtgggagcccgagttcaaaacctgcttctgctgtgtgtgactcggggcttcctctctttgagcctgtttctgtacctgcaggcagggataactgtgcctacctagcagggtcgctggtg

SEQ ID NO: 434 - DNA, 401 bp, Artificial sequence
  /note="Description of artificial sequence: rs2924441"
tcggccagtaatttaatttttaacaatggcagagttaaaaaccagcttgccaatttcctggaagtttcgccttcagctctcctgagccggtagagctggcttcagagcacccctgctctcaggggagagtgaggtatgaatgaaggctgaataaagggaaaggaggcatctcctttcctcacccaggagatgcccttgccacattcatcctgtagtgacctggcctgccagggtggaggctcactcgtgtcctcacccagccccccatgggaaggcaagctgaagcacgtttggcacccaccctccggactaacgattctgttcagggatcacagggcacaaggacacaggagtgagtgcacacagccctgccctccagcaaagtgctcccattctactac

SEQ ID NO: 435 - DNA, 401 bp, Artificial sequence
  /note="Description of artificial sequence: rs2924446"
  misc_feature (73)..(73): n is a, c, g, or t
  misc_feature (337)..(337): n is a, c, g, or t
ggttggttggttgtttttgagacaggatctccctccatcgctcaggtgggagtgcagtggtgcaaccatggcnctctgcagcctcaacctcccgggcccaagtgaccctatcatctcagcctcctgagtatccggtactacaggctcacaccatcacacccaactaacttttggtatttgctgtagagatggggcctttccatgttgccaaggctggtctcagactcctaggctcaagcgatcctcccaccttggcttcccaaggtgcagagattaaagacataagccaccatgctggacacacagacacaaaaacagatgtaccgagactttcagnacagacacacacacacacacacacacacacacacacacacacacacgcggcacctccctcatct

SEQ ID NO: 436 - DNA, 401 bp, Artificial sequence
  /note="Description of artificial sequence: rs3017605"
  misc_feature (96)..(96): n is a, c, g, or t
  misc_feature (337)..(337): n is a, c, g, or t
gcgggtgtaatcaggctccagtgtccccggcaccataactcctccaccccacattgagccagatagaggaaggatgggcaggaaacatgagctgtnaaaggacactcggaggagaagaaatgaagacgcgaaatagagatgagggaggtgccgcgtgtgtgtgtgtgtgtgtgtgtgtgtgtgtgtgtgtgtgtgtctgtgctgaaagtctcggtacatctgtttttgtgtctgtgtgtccagcatggtggcttatgtctttaatctctgcaccttgggaagccaaggtgggaggatcgcttgagcctaggagtctgagaccagccttggcaacatngaaaggccccatctctacagcaaataccaaaagttagttgggtgtgatggtgtgagcctgtagt

SEQ ID NO: 437 - DNA, 401 bp, Artificial sequence
  /note="Description of artificial sequence: rs2100388"
  misc_feature (97)..(97): n is a, c, g, or t
  misc_feature (156)..(156): n is a, c, g, or t
  misc_feature (202)..(202): n is a, c, g, or t
  misc_feature (213)..(213): n is a, c, g, or t
caacctccacctcccgggttcaagcaattctcctgcctcagcctcccgagtagctgggattacaagtgggcaccatcacgcctggctaatttttgtntttttagtagagacggggtttcaccatgttggccaggctggtctcgaactcctgacttnaggtgatccgcctgccttggcatcccatagtgctggaattacagangtgaaccaccncgcccagccagggattacatttcaacatgagatttgaaggggacaaacatccaaaccatatcaggaggtttcagctgagaccttaaggatgagtagtgtgaaccaagcagagtgggaagaagagaattccaagcagagggactggcatgtccaaaggtcctggggtgaaaagaagctcttcaggttag

SEQ ID NO: 438 - DNA, 401 bp, Artificial sequence
  /note="Description of artificial sequence: rs2253980"
agttaccttctctcccagtcagccctgccctccctccacccagccaggctcctggagcccaggctggccgaagtcagagccctgggcctccttcttgcctgggagccaagttggaacaatggcgtttatcagtcttgtgctgtattttaaaatgagctatgataacagagcactttgactagcatttttataaataccataaaaaaaatctttcttgggccagtttcaagaatgtggggcactgggtcagtgaacaatgatgcagaacggacttgatctctttgtttgggcagccggatacccatggctagttgtaaccaccttactggtttctcaacattccccttgctcttcacaatattcggctttctgcagagagggtcatttctacatatgacact

SEQ ID NO: 439 - DNA, 401 bp, Artificial sequence; identical to SEQ ID NO: 35
  /note="Description of artificial sequence: rs2244057"
  misc_feature (73)..(73): n is a, c, g, or t

SEQ ID NO: 440 - DNA, 401 bp, Artificial sequence
  /note="Description of artificial sequence: rs2246928"
agtgccacctgtttcctgctgtgaccctggcaaatacacatgctcaggatgcttagggagatgacgaaaagcattaatctatttactccatcgcccacaacttttacctttgtttgctcaaacctcatccaccatgggcacaaaagttcccaattatagcaacacaacaatattttggggtggtcatctgcagaattttgattctctctctctctctaattctaatataatggttctcaactgcctaagaggagggcagtcacatgctttggaactggttaaagctggatgaaagggcccctggggcagctgccaatcaataaggtgcattgatacatcactgggctagagcagacatggcagaaaatgcaacaagacagagaaaacagtattacctagaa

SEQ ID NO: 441 - DNA, 401 bp, Artificial sequence
  /note="Description of artificial sequence: rs1911479"
  misc_feature (250)..(250): n is a, c, g, or t
atacaggatgaattttgaacactctatactaagcctagtaattccgttcctctcgccatttagcaaggtcatgtttctttgacatgcatgaagactcttaaaaattttaactctgcttatgtttctactcctcctccacctgtacactggcgtccaggtacccttcacctaattgtagttctttctcctgtcttgacctccgtatccttgcaaatgtgctgagccataattccaactatccaactcttgnctcattcatcaaagcccaactggaatgtcaacaaatggctacatctttgcataattttctccatggcagaatttaaagtctctgtattttaaaacatgattccatgtgcttccattatattacttatcacaatgtattcctgtcatttgct

SEQ ID NO: 442 - DNA, 401 bp, Artificial sequence
  /note="Description of artificial sequence: rs4609495"
agtctatggagtctaaaggctcccatggtataaaaacattgagctgttgtattctcctatggtaagagaaaatgttcttcaggcattcaggtgcctgaagaccctgaatctcttgctgtgactttccctaccagtataggacctcaagtgcctctattcacttagagaacttttgctatcagactccagaatatttttcccgttgaaactccattatttagtttacagatactggagttataaaattcccagtctccctccattagctacatcaaagtctgttttctaaaattcatcattttataagttgtattcccatattattttctccagaaggctgattcaactctccaaaagttgtttttgaaatgtagatatgcagagaaactttatgtttgaag

SEQ ID NO: 443 - DNA, 401 bp, Artificial sequence
  /note="Description of artificial sequence: rs4745897"
  misc_feature (111)..(111): n is a, c, g, or t
  misc_feature (389)..(389): n is a, c, g, or t
tatatgactaatgggaggggagcacagacaacatggatctgatggacaaagggatgatttacatcccaggcaggacagaatggaacagcatgaggtttcatcacactactnagaagagtgcacgatttaaaacttataaattgtttaactctggaatttcttatttaatattatcagacagtggttgaccacagataagtgaaaccatgaaaatcaaaaccatgaataaggggatgtctacttctctataacatgaaacaacaacaacaaaatgacatgacagaatacagctgatgaatttcaacattctataaaccttaaaaattgagtttcaaaacataccataatcaaaggcgaggctaaaatttaattttacgtgttgaacaaanaatgcaaaaata

SEQ ID NO: 444 - DNA, 401 bp, Artificial sequence
  /note="Description of artificial sequence: rs1911485"
  misc_feature (115)..(115): n is a, c, g, or t
  misc_feature (132)..(132): n is a, c, g, or t
  misc_feature (159)..(159): n is a, c, g, or t
actgaattgaaaacattaatgaaatataatgtgtgagcagatagattctatgagtttatgtgtgaacttacactagaaagagaagaatggcagtagatgtggggggttggaaggnatccagtcctatacacncataagagataaaaataaatttatttnttttaaattcatccttgaaataggttaatcattgaaaaagacggatctacagattccacataaccaccccctggttccatccttgcaagccgggcataaatgctgagacagaataataaataaaataacaatttaaaataatttctgggaaaattatgggactatatacatggaaagaaacttcctgaaaactggtttaagaatacatttaatcatatattttcaaaaagtaattatatata

SEQ ID NO: 445 - DNA, 401 bp, Artificial sequence
  /note="Description of artificial sequence: rs1911486"
  misc_feature (157)..(157): n is a, c, g, or t
  misc_feature (174)..(174): n is a, c, g, or t
  misc_feature (243)..(243): n is a, c, g, or t
agattctatgagtttatgtgtgaacttacactagaaagagaagaatggcagtagatgtggggggttggaaggaatccagtcctatacacacataagagataaaaataaatttatttattttaaattcatccttgaaataggttaatcattgaaaaanacggatctacagattcnacataaccaccccctggttccatcctcgcaagccgggcataaatgctgagacagaataataaataaaanaacaatttaaaataatttctgggaaaattatgggactatatacatggaaagaaacttcctgaaaactggtttaagaatacatttaatcatatattttcaaaaagtaattatatatattaaaaggtaaattttacatctgtaccaaaagtaccctgtct

SEQ ID NO: 446 - DNA, 401 bp, Artificial sequence
  /note="Description of artificial sequence: rs4523585"
  misc_feature (27)..(27): n is a, c, g, or t
taatgcactttatgctatagcacagangggcttagtgaatcgatgatggtgccaaaattagaatttatggctgtgcctaatctattgttttgctagtaagccatactgcctgatactgcctccacttaacaataaaacaagatttaaagggcaaaactgtatgatttcatactggcatatgcaagggtaaaattgaaagacggtactataaaatcatctcaccataacgaccatcgagtacttacgctctgcaaaaaatgtgtacttgtctgcccttgccagacagatagcaatatttggttcaaaggattatagtggagttaagaaaaaaagaattaaagactggttttcgtatgtctgaaagctttgcatacaaaagtacatcatggaacgacactcac

SEQ ID NO: 447 - DNA, 401 bp, Artificial sequence
  /note="Description of artificial sequence: rs2578210"
  misc_feature (297)..(297): n is a, c, g, or t
gtccgggttttcagcttccctgggccacatcagaagaagaataattgtcttagactgcacataaaatacactaacactaacgatagctgatgagcttaaaaaaaaactcccagaattctcataatgttttaagaaagtttacgaatttctgctgggccacattcaaagccatttcgggcctcatgtggcccatgggtggcagattggacaagcttgctctagattctccttaggtagaagtaggatttccttcacctcaaaggactgcagacattcagcacaataaccttccaaccngctagcaaagccctttctagaaggggagacaagaatccaaaaagcacgccagaaagaagccgaaagtgagggacctcggacgtaatcacaccagaactctgtga

SEQ ID NO: 448 - DNA, 401 bp, Artificial sequence; identical to SEQ ID NO: 60
  /note="Description of artificial sequence: rs4799159"

SEQ ID NO: 449 - DNA, 401 bp, Artificial sequence
  /note="Description of artificial sequence: rs2197742"
  misc_feature (94)..(94): n is a, c, g, or t
  misc_feature (282)..(282): n is a, c, g, or t
  misc_feature (307)..(307): n is a, c, g, or t
aaacttagctaggattactttattagtcaattatttgtccatctaatcacacaggtttgtcttaggaaaaaacaaatcatatttccataatatnttacaagtattaacagtaaatggatttgtaagccaaagcatccttgaaataaatgctaagggaaaagccagtgtgtatcaaatgaaataggagaggatatgattaaattttcccctgtattttcttagatgatgacactaatggaatttttgatgtaatttaaaaaccactctgcactaaagaaaganaacactacctgatttgataacccanaccagataaaaataaacaagcagaaagatcatcactaattacaggtaggctgaaaatacattgtgatatctaccacatgctaaaatcaaggttt

SEQ ID NO: 450 - DNA, 401 bp, Artificial sequence
  /note="Description of artificial sequence: rs3809939"
  misc_feature (11)..(11): n is a, c, g, or t
  misc_feature (20)..(20): n is a, c, g, or t
atggtgcaatnattttgtanaggtctttgtcagtggattcaaaataaccagaaacaataatgattattatttagaattccagtgtaattttccagctgagatgcagcctcaggtgtggacagagtggaaaatgaggtgatttgtgtccagcccgtcttcagggaggggagaccctgctactggctcctcattgcccggcacggagtgtcctcccccaaaagatgctggaatgtggctccacgggagccatgaatccgtgtgaccctaggctcgtcactgtcacagtgcacatttcatggcctcaaacgggtcttccttgtgtgtaaacttcagagagaaagtgccttcatggggtgaacacagaagtgccaccccaggaagcctctgctgcccagcagcag

SEQ ID NO: 451 - DNA, 401 bp, Artificial sequence
  /note="Description of artificial sequence: rs3859315"
  misc_feature (162)..(162): n is a, c, g, or t
agtgtggacttgtggtggctttgctgacgtctctccatagagagttgcaggtagaaatctccgcagcttttgcttaaagccaacagtgatggatttctccaggacgttgagttccagctcagcagctctttatacacaatttacagctaaccctcgaacaanttgctttggtctgcgagggccacctttatgtagatgttgttcagtaaatcgtctgctgttcgcatccatgggttccacgcccaacactgtttgctgggtgtggagcccagcctgtttatacagagcgctgactttctggatcagtgggttctccaggttgactgcgggacctgagtatctgtggatgtggaatttggtatctgaaggagtcctgcagcccgtcccccgtgagaatgagg

SEQ ID NO: 452 - DNA, 401 bp, Artificial sequence
  /note="Description of artificial sequence: rs3859316"
  misc_feature (17)..(18): n is a, c, g, or t
  misc_feature (240)..(240): n is a, c, g, or t
gagagttgcaggtaganntctccgcagcttttgcttaaagccaacagtgatggatttctccaggacgttgagttccagctcagcagctctttatacacaatttacagctaaccctcgaacaacttgctttggtctgcgagggccacctttatgtagatgtttttcagtaaatcgtctgctgttcgcatccatgggttccaagcccaacactgtttgctgggtgtggagcccagcctgttnatacagagcgctgactttctggatcagtgggttctccaggttgactgcgggacctgagtatctgtggatgtggaatttggtatctgaaggagtcctgcagcccgtcccccgtgagaatgagggactgattaaatatggaagtctttccataatagattgtg

SEQ ID NO: 453 - DNA, 401 bp, Artificial sequence
  /note="Description of artificial sequence: rs3809936"
ccccacttgacatccagaggagaccctgaggctggtgcctggccctactgctggcccctctgaaagcaatttcagggatcagaagtggtgctggccacagctcccgaagcctggacagctgctggactttttactgttgagtaatgggaaagttgttactagaacttctcactcctaaatatttgacagagtagcttcttcatgacggtcgtgactaacttagagctagaaaaatgtaactgggaaagttgttactagaacttctcactcctaaaccttgaacagagtagcttcttcatgagggtcgtaactaacttagaactagaaaaatgtaactgagcttaagtcatctacctttttttaaagccattaagagtaaatattttactgagaaaataaca

SEQ ID NO: 454 - DNA, 401 bp, Artificial sequence
  /note="Description of artificial sequence: rs3786235"
cgaagctgagcatcaagcatgtgaagctctttagaaaattactgttaaaaagttaaactagacttgtaattaacggatgtcatgtgaagtgcaagtgtcaaatgtagcctaagcggattcttcgctgtggaagcaccttctgcactagctggtcaaggtggtgtcccggatgtccttccttcccagtctcctctgtcaggcaggcttcctcgatgttgcctaaattaccattattaaaacgtgtataatagttagaaataaccggcctttctgtgtatttctacaacacagagtgtgagtttgtataattctactaaagtaacttgggagaagcaaacttccttgataacctttcctccactaaccattacagatgagagcagtgggccacccgcctgggg

SEQ ID NO: 455 - DNA, 401 bp, Artificial sequence
  /note="Description of artificial sequence: rs2279103"
  misc_feature (160)..(160): n is a, c, g, or t
  misc_feature (263)..(263): n is a, c, g, or t
acttttcattattattttttgtaaattatgcattttcacttgtagaaatctctttccttgtggagactcaatggtttgcattattgatgatcgagaagatgtctggaagtttgcccccaatctgataactgtgaagaaatatgtatacttccagggcacnggtgatatgaatgcgccccctgggtcccgagaatctcagacgagaaagaaaggtgggtaacctccttcctgattctctagaagaattcacatttgcttattgnttagctcttcttatttcttatctctgttttgactgctataaattcaagatacactttttttatttgtgtttcagtagagattattggatttatttatagagtactgaaaaacaggatattaggttgtttcaatttggg

SEQ ID NO: 456 - DNA, 401 bp, Artificial sequence; identical to SEQ ID NO: 79
  /note="Description of artificial sequence: rs523386"
  misc_feature (50)..(50): n is a, c, g, or t
  misc_feature (367)..(367): n is a, c, g, or t
  misc_feature (387)..(387): n is a, c, g, or t

SEQ ID NO: 457 - DNA, 401 bp, Artificial sequence
  /note="Description of artificial sequence: rs496036"
  misc_feature (205)..(205): n is a, c, g, or t
  misc_feature (250)..(250): n is a, c, g, or t
  misc_feature (331)..(331): n is a, c, g, or t
tttctgaatgatttctttggatttggcttccagttcactggttttctcttcagctgtgtctaatgtgctttttgatctgtccattgagttttaaatttcagatgaactctaaataggatttttaaagtgaaaaagcatctccaaaaatgtgtgatgattttaaaattttaaaaaactattttttgtaaagagaaggtctcatcangttgcccatgctggtctcaaactgctgggctcaaacaaactggcntttcagggtgctggggttccaggcggagctgctgcacctggctcgtgtgatgatgttctaatagtctctgtcacacacacncctttcctttatttccttacatagatcaaacctgcttgtctcagcttctgtgacgatcaagcatccgaca

SEQ ID NO: 458 - DNA, 401 bp, Artificial sequence
  /note="Description of artificial sequence: rs1958438"
tatcactccagatgttctggacagaacaaagataggctagaatatgtgatgtaatgaattaatgaatttttttatacttcatcagccaacatcaagataaactgtattgaactagcatgtgtccagctgaagagtgtttaaactgttagtgcaaagctgaaacttcaataaacgctaggaaaggatccaggttttattaccggtgatacagtttgagtggataaattctaaccattttagctaaaccctccagcttcatattaatcatgaagtagaataaagtggggaaaaaaaacaaccatggggaatgtgaaaataagagtttaaaactgaagtattacaaaggtcagcttctttatgagaagacaaacatagctgcattttaattaaattatgagatt

SEQ ID NO: 459 - DNA, 401 bp, Artificial sequence
  /note="Description of artificial sequence: rs1952534"
  misc_feature (15)..(15): n is a, c, g, or t
  misc_feature (93)..(93): n is a, c, g, or t
  misc_feature (103)..(103): n is a, c, g, or t
  misc_feature (119)..(119): n is a, c, g, or t
agtaagtcttatagntgggtaaggtcttcccactttgttgtacttattcagtatcatgttggctatttcgttgtttttttgttgttgtttttncttttttttnattttttttatttccntataaacattatctctttgtggatatctacaaagtagcttgctgggattctgacaggaattgcactgaatctttagatcaaactggaagaattaacatcttcacaatattaacttttccaatttatgaatacagaatatctctccatttatttggatcttcttttgatttctttcatcagagttttgtacttttctgcatgcaaattctgtaaatagctctttagatttatacctaggtatattatcttttatcgttcctaatgtatttctttttaaaattt

SEQ ID NO: 460 - DNA, 401 bp, Artificial sequence
  /note="Description of artificial sequence: rs1958436"
  misc_feature (97)..(97): n is a, c, g, or t
  misc_feature (175)..(175): n is a, c, g, or t
  misc_feature (185)..(185): n is a, c, g, or t
  misc_feature (283)..(283): n is a, c, g, or t
caaagatcaaagatcagttcataatatctgtgtgggtctacttctgggctttctgttctgttccactgacaaattgaaatatagtaagtcttatagntgggtaaggtcttcccactttgttgtacttattcagtatcatgttggctatttcgttgtttttttgttgttgtttttncttttttttnattttttttatttccatataaacattatctctttgtggatatctacaaagtagcttgctgggattctgacaggaattgcactgaatctttagatcaanctggaagaattaacatcttcacaatattaacttttccaatttatgaatacagaatatctctccatttatttggatcttcttttgatttctttcatcagagttttgtacttttctgcat

SEQ ID NO: 461 - DNA, 401 bp, Artificial sequence
  /note="Description of artificial sequence: rs1958435"
  misc_feature (8)..(8): n is a, c, g, or t
caaaacanaaaattgtatttttttctaccctggattttcaccaactttaggaaggtcatttatgcttcatagttttaaaatatacttctaccctgttgttctaagtcactccagctcctgtgggaatcttaagcaacattccactacatggcaatctgtgtaaaatcattgatcagagagatcatggttatgggcttctgagctgtaagaatgccccgagctaaattcactatgcaaagaaataattctcaaattaggatgctcatggtaatcaccagttgtggtttttaaatatgcagataccagagcccctgcaacatagtttctgattcagtgtctaaaacaatgtttctaaaacttactttgaataaaaatcaattggattatttattaaatgcata

SEQ ID NO: 462 - DNA, 401 bp, Artificial sequence
  /note="Description of artificial sequence: rs1958434"
  misc_feature (150)..(150): n is a, c, g, or t
  misc_feature (394)..(394): n is a, c, g, or t
ggaaagaataagcttccagatgagggaaagaagatggcgacacaattcatttcactctccagagattctataatttacattttttttcccaattgcttgagcccgggagttcaaggctgcagtgagctacgatcatgccactgcatgccngcccaggcaacagagcaaacctcatctcaaaaacaaaacagaacaaaacaaaaaattgtatttttttctaccctggattttcaccaactttaggaaggtcatttatgcttcatagttttaaaatatacttctaccctgttgttctaagtcactccagctcctgtgggaatcttaagcaacattccactacatggcaatctgtgtaaaatcattgatcagagagatcatggttatgggcttctgngctgtaa

SEQ ID NO: 463 - DNA, 401 bp, Artificial sequence
  /note="Description of artificial sequence: rs1958433"
tcctgatgactacagagattagacgctcaataccactgagaagaagcacctgtggcaagggcagagcttttaatgcaaaaatagagcttatttattaggctcaaacatttctatgtcagctgtcatttcttcatggcaagatgtcctcctctcctccccagcttgctcaaaggagctgtcaggtcagaaaaggggaaaaacgaaacaaatgctttttctctttcaatttcccagtgggggagccctgttgaaatgccaggcatgccctgctgctttctgcatcaacagatggcagacgggctgcattccttgtgtttgtttcccatttagcaaattgcagctcacatctggtctagcctctgcttggtctgagcagatgggagttcacattctttataggt

SEQ ID NO: 464 - DNA, 401 bp, Artificial sequence
  /note="Description of artificial sequence: rs2149684"
tgtgcagaatttgattatttcgaacagcatctacattgaaaataggagttagtatttttacaagttgtagatgttagtaacaattttgcatttatttggtaatcattcaaatgataattttgtgtacaaaacgggcaatttttgaagtaatctaacattttatttagaaaataaagagcttgcaaaaatcaggaagacccatgtgtccttcttcgaagaaaacacttattaaaatccagggttacctccattagtaaataaggacattgtcaaaactaagttcattttctttaaagtacatgtttttaaaaattacatactttattagataatggggcctcatgtaaacaggcactgcactttattcatcatgattcaccccagtgagcaacagaggtctt

SEQ ID NO: 465 - DNA, 401 bp, Artificial sequence
  /note="Description of artificial sequence: rs2183203"
catacatggttgtattttttatagcctatagccctctctctctcaatggactatgaatttgttagaggaagataaccactcacatttctgcataccaaatacattttatggaagttggcacttagtaggtttttatttgaaatgtataggctgtttggaaaaaaaaaagaaaaaaaatagctcttttctactgcaaaaacgtattgtatagtacggtattgtgaggagaactcataggttctagagttaccatgtgcagaatttgattatttcgaacagcatctacattgaaaataggagttagtatttttacaagttgtagatgttagtaacaattttgcatttatttggtaatcattcaaatgataattttgtgtacaaaacgggcaatttttgaagta

SEQ ID NO: 466 - DNA, 401 bp, Artificial sequence
  /note="Description of artificial sequence: rs1958432"
  misc_feature (79)..(79): n is a, c, g, or t
  misc_feature (277)..(277): n is a, c, g, or t
tttccaattgcctggattcattggaaaatcaccccctttctttcttagcaacatatgtttaggtcattatttaagaaancagccttttgtaaaaatttgtttcagaattatattccataactaaagaatatttattttaaaaaggattgttttacagcctttctttatctgaatggtttattctttaacttaacaaaagtattaaagcaaataaaacattcctcaggattcatcttatgaggttacttccaattattattcttttactttttgagantgtcctgagcctttgtatagaatttgtgctcttactgcatttacagatatcagtaatatcattatgcatacatggttgtattttttatagcctatagccctctctctctcaatggactatgaat

SEQ ID NO: 467 - DNA, 401 bp, Artificial sequence
  /note="Description of artificial sequence: rs2149683"
  misc_feature (68)..(68): n is a, c, g, or t
  misc_feature (97)..(97): n is a, c, g, or t
tcaagtgtcaacatgtgacacatatttgagaaggcccttttcctaactcttctttagatcacattcanctagcaatcctaagaaccaggactgcttngaaaatgacatttttgattgtcagggatcataatgaacttttataatttacatttaagagcagagaatatgactcagcaagaaagaaaaaaaatgagaaaacagtatgtgtggcctgcaaaagacaagctgctgttagcagtggtgaatctgtatgggcctgcagcaacttgattcttgcctcctcaaaggaaagaatttgtccaaggggcataaggcagaggaagagactgaggcaagttttagagcaggagtgaatgtttattaaaaagttttagagcaggaatggaaggaagtaaagtaca

SEQ ID NO: 468 - DNA, 401 bp, Artificial sequence
  /note="Description of artificial sequence: rs1958430"
  misc_feature (29)..(29): n is a, c, g, or t
  misc_feature (125)..(125): n is a, c, g, or t
  misc_feature (325)..(325): n is a, c, g, or t
  misc_feature (346)..(346): n is a, c, g, or t
accaggtatgttacagcctcaaggccatngcacttgccatcctctttgcctgaaatactcttcccctaaatagttacatcacttatatcttcgtggtctccaagtctttatgccaaaagcacttnctactaaatatttccactatcccgtatgtaaaagtagactcctgatagtcatagcacagttcctgatgtgtctgcatagtacgcatgctcccatcctgatctaatacaagttttattacttttttatttttagtttcttttttcacgtctcatacattaacatctaaatttcataagagaaggcattttagtctcttttntttgcctctgtatctttctcnctgacccccagtcccatctagaatagtgcttggttcacggtagatactcaataaa

SEQ ID NO: 469 - DNA, 401 bp, Artificial sequence
  /note="Description of artificial sequence: rs1958429"
  misc_feature (105)..(105): n is a, c, g, or t
  misc_feature (277)..(277): n is a, c, g, or t
  misc_feature (401)..(401): n is a, c, g, or t
cacataaagtctcccagggcttgacctctgttcctctctgactcatgcacttccaagtgcactcttctttgaacacaccaggtatgttacagcctcaaggccatngcacttgccatcctctttgcctgaaatactcttcccctaaatagttacatcacttatatcttcgtggtctccaagtctttatgccaaaagcacttgctactaaatatttccactatcccgtatgtaaaagtagactcctgatagtcatagcacagttcctgatgtgtctgcntagtacgcatgctcccatcctgatctaatacaagttttattacttttttatttttagtttcttttttcacgtctcatacattaacatctaaatttcataagagaaggcattttagtctcttttn

SEQ ID NO: 470 - DNA, 401 bp, Artificial sequence
  /note="Description of artificial sequence: rs1958428"
  misc_feature (12)..(12): n is a, c, g, or t
  misc_feature (297)..(297): n is a, c, g, or t
  misc_feature (373)..(373): n is a, c, g, or t
ttaagactaggncagatcccattgcctctctcctgaacaccttccaattgctctccatcttatccaaagagaaaactgaagcccttataataatgacacataaagtctcccagggcttgacctctgttcctctctgactcatgcacttccaagtgcactcttctttgaacacaccaggtatgttacagcctcaaggccatcgcacttgccatcctctttgcctgaaatactcttcccctaaatagttacatcacttatatcttcgtggtctccaagtctttatgccaaaagcacttnctactaaatatttccactatcccgtatgtaaaagtagactcctgatagtcatagcacagttcctgatgtgtctgcntagtacgcatgctcccatcctgatctaa

SEQ ID NO: 471 - DNA, 401 bp, Artificial sequence
  /note="Description of artificial sequence: rs1958426"
tttatcttctagcttactgttccatttatacacactggttcttccagactacttggtgatttcaacatgcacatggatgaagcttctagcaaattggcctctaagtttagtgatcttatctctcatctcatcaaaactactcaatcttatggtgataccctggtagactctatctcttcataacttcagctttccttaaactaaatttcaaaagccccactctccaatcaacaatttctagcttattccatcgacttccttcagtccaacaatctttgcaacaaccagcctttctataacatcaattcatttgtcctgctggtattttactgtccctggttctcatcatctgctgcttccctcgttactcaacataaattcaactgtcaattatactaaac

SEQ ID NO: 472 - DNA, 401 bp, Artificial sequence
  /note="Description of artificial sequence: rs1958425"
  misc_feature (62)..(62): n is a, c, g, or t
  misc_feature (106)..(106): n is a, c, g, or t
gtacatcttcccctctaaaaaggtaacttttttctttactcttgctaatcagcctgaagganaaatagcagcttttcttacttcttgtgaccattcacttcctctnccataaaaagatagagtattttattttagtggcattagactgtaatatacgccacccttatttatagcagtcattcaccagggcattcttctccatctgtcttgtatattttatcttctagcttactgttccatttatacacactggttcttccagactacttggtgatttcaacatgcacatggatgaagcttctagcaaattggcctctaagtttagtgatcttatctctcatctcatcaaaactactcaatcttatggtgataccctggtagactctatctcttcataactt

SEQ ID NO: 473 - DNA, 401 bp, Artificial sequence
  /note="Description of artificial sequence: rs1958424"
  misc_feature (157)..(157): n is a, c, g, or t
  misc_feature (296)..(296): n is a, c, g, or t
ttttcagccatccgcaaaatcctttacatactagaaaattcatgtgaaagtttgctttatctactttctcaatggaaaattggttctcctctgaggtacatcttcccctctaaaaaggtaacttttttctttactcttgctaatcagcctgaagganaaatagcagcttttcttacttcttgtgaccattcacttcctctcccataaaaagatagagtattttattttagtggcattagactgtaatatacgccacccttatttatagcagtcattcaccagggcattcttctccntctgtcttgtatattttatcttctagcttactgttccatttatacacactggttcttccagactacttggtgatttcaacatgcacatggatgaagcttctagca

SEQ ID NO: 474 - DNA, 401 bp, Artificial sequence
  /note="Description of artificial sequence: rs1958423"
  misc_feature (63)..(63): n is a, c, g, or t
  misc_feature (358)..(358): n is a, c, g, or t
atggggagataaagggaatctacaagaactctctggtttgaaatatgattactcttctgcttncctgtgagcctgtgtaggcagagaataagaggagagtctttgcactctgagaagcattgctacccgcagctgctatatctctatcagcggggggaccactgaactgtggcttcctgacagcacaaatttcatactgcacttcagagtcatcatcactcactgcctgaggatcatcaagacaattatttctttcttttatccatggttacatcagtcaccataaaaaaccaggggcattctaaaaatgatgtcaaccactggactctataacttttaacattccatcttccacctntgcctaattctgaattaattcctgtgtgctctctggaagtcat

SEQ ID NO: 475 - DNA, 401 bp, Artificial sequence
  /note="Description of artificial sequence: rs1958422"
  misc_feature (339)..(339): n is a, c, g, or t
gaaagatatcaaacaggggttcaggaaagaagtttatggctcccaaatctattctgctagtgtaaatataacatacacttacccttttctgttaagctttggtctattatttgattgggaacaatactggcaggtgtgatggggagataaagggaatctacaagaactctctggtttgaaatatgattactcttctgcttccctgtgagcctgtgtaggcagagaataagaggagagtctttgcactctgagaagcattgctacccgcagctgctatatctctatcagcggggggaccactgaactgtggcttcctgacagcacaaatttcatactgcncttcagagtcatcatcactcactgcctgaggatcatcaagacaattatttctttcttttatc

SEQ ID NO: 476 - DNA, 401 bp, Artificial sequence
  /note="Description of artificial sequence: rs1958421"
  misc_feature (80)..(80): n is a, c, g, or t
  misc_feature (312)..(312): n is a, c, g, or t
ttatctttcagtaaattcctaatgaaataacaaagtgtattgggttatctccaactgccgtaccatactactctctaaanatagcaagtcaaaaatgactgactttgccaatatcctgagattctacagacatctcagtgaaggcagaggatggtggggagagtggcatttggctcagcttcagaactggcactgtctccatgataaagggatcctgttaacttctgttttccacctcctgacagttgacattttaatgtgtgtcaggaaaatccatcaacatgctacctctctcaaacccaggatttcgcnttgggatcagtaggaatctgatcagagctaacacaagccctccttctcattaaagcataccccattcccattgttgactgtcctaattt

SEQ ID NO: 477 - DNA, 401 bp, Artificial sequence
  /note="Description of artificial sequence: rs1958420"
  misc_feature (322)..(322): n is a, c, g, or t
ttttgctccccattaattcccacttggaatagctcctgactttacaaaactttgtggcagcacattcactgatgactgatcactccttctcattgcagaaatagggcataagcagcaagatttatctttcagtaaattcctaatgaaataacaaagtgtattgggttatctccaactgccgtaccatactactctctaaaaatagcaagtcaaaaatgactgactttgccaatatcctgagattctacagacatctcagtgaaggcagaggatggtggggagagtggcatttggctcagcttcagaactggcactgtctccntgataaagggatcctgttaacttctgttttccacctcctgacagttgacattttaatgtgtgtcaggaaaatccatcaa

SEQ ID NO: 478 - DNA, 401 bp, Artificial sequence
  /note="Description of artificial sequence: rs4545730"
caacacagaatctctggcatcgagcactgggcctggcatgcagcaagcatttttacttagggatgtaatgaatgagtgcaataaaaagtccaattgtgcattcatatgctttaatttgattcaaattttcaatggaacttttctcagaggtaatgcactcaggtgggtaaacaaaaattaagcaatattattgcaaacacatatactagggtatatggcaaatattcataaaattaaagtgattttccatttcccaactctatacccaaatgaatatacaaccactgggaagagaaaaacatcagttagtatgtttttattcttttgtcctggttttcatcaacacaataggtaattcttatatggaagtagatcatattcaatttaaatataaatatgtt

SEQ ID NO: 479 - DNA, 401 bp, Artificial sequence
  /note="Description of artificial sequence: rs1952530"
ataagaataattggatcatactttatctgcaaatgatactaaattcctttcatctaacctaaaaagttgtcattttgctcatagtacaaatatattacagtgctgaattatctgcatgctatgggagaaaaggtttaaagtttaaaacatttttatgtaatagaaaatgtagtatacaaagatacttatgatccaaattaagttttgagttgacttttgaaaaattttttgcatctatcttaacatttattttcttatttttatgaacaataggatccatgtaaattgtccagtaaggtgttgatcaaggtcttcaagtaactgatatgagtttataaatgaaatatccaaatggctacaccatgttcagtccaaagttatcataaccattggaagaaaat

SEQ ID NO: 480 - DNA, 401 bp, Artificial sequence
  /note="Description of artificial sequence: rs1952529"
  misc_feature (179)..(179): n is a, c, g, or t
  misc_feature (236)..(236): n is a, c, g, or t
agattggattggcaccaaattcctggaatttgatcgtttttggaaaggctgtaaatatttcccttatattgccctgcgtaaccaaggttctaaaactgtgttctttgtccatcaaaactgggtagagtttccagtgacacaactttttgcattttttgaccatcgattggttgctatcngtacagctatgtagagaactaagaaaatgaatcaagtaacaatgatttccccatgtntaaacctaactttccctttgtactgttagttcctgaaaatcgctcctaatttaggcttatccaagttgctggtccactctgcgagtgaggcaaggtgggccaaagagagaggccattgctcctgcgccactgcttcatcaggcactgaggtcacctattattcca

SEQ ID NO: 481 - DNA, 401 bp, Artificial sequence
  /note="Description of artificial sequence: rs1952528"
  misc_feature (20)..(20): n is a, c, g, or t
  misc_feature (133)..(133): n is a, c, g, or t
  misc_feature (336)..(336): n is a, c, g, or t
ctgtatcccacatattgtantattaaaggagaaatacttaggcagcttacacagaatgcttctttagtaggggatacagagcattgatgtgagagcaagagacctgtgtttaagtgttaacactaccatgcantaactatgagacaacagcaattccatgaactggtagagttttgagctggaagattggtttttgttacgctctatggttaatttcttttaatacttggtatgatttaaagttacaggctgtgactttacaactgcaaagccactggtaaaatattaaaacattcacaagctatgaaataaaatcccataattttaaattaaagncatttgtttaagcttactcattaataaaatatacatgcaaacataaccctagatgtttccaaatg

SEQ ID NO: 482 - DNA, 401 bp, Artificial sequence
  /note="Description of artificial sequence: rs1958418"
  misc_feature (88)..(88): n is a, c, g, or t
  misc_feature (269)..(269): n is a, c, g, or t
tgtatttgaaattataaagctcaatagagtaaggacattcaaaataaaaatcacaaggcaatatggctctgtatcccacatattgtantattaaaggagaaatacttaggcagcttacacagaatgcttctttagtaggggatacagagcattgatgtgagagcaagagacctgtgtttaagtgttaacactaccatgcactaactatgagacaacagcaattccatgaactggtagagttttgagctggaagattggtttttgttacnctctatggttaatttcttttaatacttggtatgatttaaagttacaggctgtgactttacaactgcaaagccactggtaaaatattaaaacattcacaagctatgaaataaaatcccataattttaaattaa

SEQ ID NO: 483 - DNA, 401 bp, Artificial sequence
  /note="Description of artificial sequence: rs2372550"
  misc_feature (71)..(71): n is a, c, g, or t
acaggatggcattgagtgcctgcagcttttctaggctcatactgcaagctgttggatcaaccattctgggntctggaggatggcagcccctttctcacaactccactgggcagtgccccagtgaagactccatgtgggggctccaatcccacatttcccctctgcattgccctactagagggtcttcatgaaggctcttcccctgcagctgacttctgcctggacatccaggtgtttgcatacattctctaaaatttaggcagaggtttccaaacctcagctcccatcttctgcacacccacaggcccaacaccacttgaaaaccaacaaggtttggggcttgcaccctctgaagccacagtccaagctctatctaagccctttagccacagctggagctt

SEQ ID NO: 484 - DNA, 401 bp, Artificial sequence
  /note="Description of artificial sequence: rs1952545"
ataaaatgctctttatttaaatctttaaataaaagttttacttcaaaaaaagaagcaactcttcttcatttaatatctgcttaagagattctcactcttaaaatcctgagaaataaacagcaatatatattcccaaaacaaaatttagtgcccaatattggtaggctagaaccaccaatacccctgatcccattctttccacttagattgcaatctaccaaaagtcacttggagacactgataaggcttggctctgtgttcccaccaaaatttcatgttgaattgtaattctcaatgttgggggagggacctggtgggaggtgattggattatggagatggatttccctatgctgttctcatgatagtcattgagttctaatgagatctgatgttttaaaa

SEQ ID NO: 485 - DNA, 401 bp, Artificial sequence
  /note="Description of artificial sequence: rs1952544"
  misc_feature (105)..(105): n is a, c, g, or t
tatgatagaagtccaccaaagtagtcaatgctgttgcatctctctactgcacaacacaatttcatctctagtaataataagatgttggagacctaatgaggcaangtacagccagataatttagctgggagattttatgcagtaggactcattttataagcactctaaacaaaggttggatctatggaacccagtacaaaaagtaaatggtcctagttaaatgatagaaagaagtgtcattaaaggaagcagaatataatgctttctttattattctatggtctctgtctgtcaacttgacatagtgttttgtgtttactatttaacatcattcttatttaaaaaattttacattattttccaattttattttaggtttgatgttacatgtgaagttttct

SEQ ID NO: 486 - DNA, 401 bp, Artificial sequence
  /note="Description of artificial sequence: rs4899838"
tagaacccaaataaatacagagaaaaagaaattaaatgacatttacaccagacacataaagtgaaatagcaagattacaaagacaaagtgactcagtgattggcataaaattttaattaaataccgatgttaatgtttaaaaattaatccataaacaagaagactaacgtgtatatttgtcaagctatttgaggaaaaagaaaaaaaaactgaggtaagcaaaacatatttcaatccaatgggtccatttaatccaatcaatccaactcaagagaggaacaaagtgttatagtaaaagtaagacaaagaaataaataagatgaggaaagcaaattcaaaataataatagcaatccatatatatgaaccaacaagtcaaattaaaagacaaagcttttcata

SEQ ID NO: 487 - DNA, 401 bp, Artificial sequence
  /note="Description of artificial sequence: rs4899839"
  misc_feature (4)..(4): n is a, c, g, or t
  misc_feature (41)..(41): n is a, c, g, or t
  misc_feature (60)..(60): n is a, c, g, or t
aaanctctctttactcttttgaaattcctatcacttttctngtatgtaaaccaaagtttntttctcaactaacttctgaaatcttaacttaatctcattcacttccttgcattgtgttatagaccacttagaagtacttttattatttaaccttagatatattatattttctaattccttctttcaaagattattaaagtaagaaggcccaaccatccagatcaacttattgatccaaaaccagagtgtttataattaactgacttgcctaagacaaaattgccaaatctgagccctaaactggaattttgtaacattgtcgcctcgctctgtttatttcacattttgacacattttattttgcccagtttgcttgtaaacatgtaatggaaacagctaaa

SEQ ID NO: 488 - DNA, 401 bp, Artificial sequence
  /note="Description of artificial sequence: rs2888357"
  misc_feature (20)..(20): n is a, c, g, or t
  misc_feature (214)..(214): n is a, c, g, or t
  misc_feature (316)..(316): n is a, c, g, or t
gctggtcacccatttaccangttaagcatcatgagaagtaagatatatctgaggataattatgttgagcttagtatggtacatgctgagttgcttgtggtatatttaggtggagaagtccgataaacagtggtgaatatttagggctaccatattgcacaacctcaggaagaaccacttccggcacaatctatgttagtgatgcttctatgctnggggatactgtctggtaacagagaattttcgtttttcactttttaatagttttctgctaattgaagcatggacaatacatttggacacctagggaacatgtntactataaggtgatagagagttgtaaataaaattcagaggagtttctctatggaaaagacaaactgagaagcattaacccaagag

SEQ ID NO: 489 - DNA, 401 bp, Artificial sequence
  /note="Description of artificial sequence: rs4143911"
  misc_feature (303)..(303): n is a, c, g, or t
  misc_feature (316)..(316): n is a, c, g, or t
ctgaaatataggttcccatttttctaggactgacatttagtattgatacagtcagtcatcccattggtttggttagagcatgtggtattatcactttaactgctgcttagtctctctcttgggttaatgcttctcagtttgtcttttccatagagaaactcctctgaattttatttacaactctctatcaccttatagtaaacatgttccctaggtgtccaaatgtattgtccatgcttcaattagcagaaaactattaaaaagtgaaaaacgaaaattctctgttaccagacagtatccccnagcatagaagcancactaacatagattgtgccggaagtggttcttcctgaggttgtgcaatatggtagccctaaatattcaccactgtttatcggact

SEQ ID NO: 490 - DNA, 401 bp, Artificial sequence
  /note="Description of artificial sequence: rs1958458"
  misc_feature (58)..(58): n is a, c, g, or t
  misc_feature (104)..(104): n is a, c, g, or t
tacaaagtcatttaattttctaagcacaatttctcaacttaggaactagaaatcacanctgcacacgcacatggcatacttaggataaatattttcatgcctgnctgtttacatactaactacaatcatcattcttatcatcattgtcatccctgtctccctccgttaaaggacatgcagtaatctgagatttgaacacaaagtaacttgaccctcaaaagcatactatttcatctataaacactaaattgttactacctattagactactgaaatataggttcccatttttctaggactgacatttagtattgatacagtcagtcatcccattggtttggttagagcatgtggtattatcactttaactgctgcttagtctctctcttgggttaatgctt

SEQ ID NO: 491 - DNA, 401 bp, Artificial sequence
  /note="Description of artificial sequence: rs2372553"
  misc_feature (60)..(60): n is a, c, g, or t
ggaaatgagcctgttgattaactccttgagatagaacctccatccttaggcacatggtgncatgtaaggtttagcattgccactgcttcttgagtcttctcttttgcataatgtacactaaacacccttcagatggtatgttcatgaagatctctttgccattcttgtctcatttgtagtatggagaagatgctccagataaattggaagactatatcagaaatctcttcatggagaactcctagtacaaagcctggactactgtaaatgcttcatgattacagccagtttaatttcacttaaatcctacttaaagcattatttgtattattctacccagataaatctatattttaagatacattagaagtgaaaaatatattatttacatcactagataa

SEQ ID NO: 492 - DNA, 401 bp, Artificial sequence
  /note="Description of artificial sequence: rs1958456"
  misc_feature (97)..(97): n is a, c, g, or t
atattcaactcccataagaaaaaaaaaagttagaatcatgattatgtttgattactggtccaatcctgtctcttacaaagtgaaattcaatgaatangaatggagtacattttttctgaataagcaggtttccttgttgttaactctgattcatcttcctggaaatggatccatgtgagaattcaaagccagtgtaaaatccttggctgcttagcaaaaaaaaggcaaaatttagaaaatgtctgaaccagagattacttagcgattagtggaattcaggatgatgttacattaaatacagtaaaataaattctaaagaaatcatgtaaatatttttttcaaggatgtgagctggctttcacctgagactgcagaggggataaaaaaaaggaatcttgtag

SEQ ID NO: 493 - DNA, 401 bp, Artificial sequence
  /note="Description of artificial sequence: rs1958455"
  misc_feature (305)..(305): n is a, c, g, or t
ctgctgaaacaatatggctcatagagaataatagagaagaaagaacacccctaacagtaccctgagtcccccagtttcatgtgatagggattttcggtacttgaatattcaactcccataagaaaaaaaaaagttagaatcatgattatgtttgattactggtccaatcctgtctcttacaaagtgaaattcaatgaataagaatggagtacattttttctgaataagcaggtttccttgttgttaactctgattcatcttcctggaaatggatccatgtgagaattcaaagccagtgtaaaatncttggctgcttagcaaaaaaaaggcaaaatttagaaaatgtctgaaccagagattacttagcgattagtggaattcaggatgatgttacattaaat

SEQ ID NO: 494 - DNA, 401 bp, Artificial sequence
  /note="Description of artificial sequence: rs2372523"
  misc_feature (298)..(298): n is a, c, g, or t
ttctaacttttttttttcttatgggagttgaatattcaagtaccgaaaatccctatcacatgaaactgggggactcagggtactgttaggggtgttctttcttctctattattctctatgagccatattgtttcagcagatcactgatgacctcagataattagaatggcagattgaaatgacaaacttctaaccataagaaagtattataaaaattatatttattattctaataaaatagttgaagttttctataatgttatgtcaaataccccttttcaaacagattggggaaganagaaactattatttaccatcgagattacaaaagcaaattttggcttttgttgaaaatagaaaatagtaattatttttggagaaaaaaccaacttcaccttttt

SEQ ID NO: 495 - DNA, 401 bp, Artificial sequence
  /note="Description of artificial sequence: rs2372524"
  misc_feature (104)..(104): n is a, c, g, or t
  misc_feature (317)..(317): n is a, c, g, or t
  misc_feature (382)..(382): n is a, c, g, or t
tttcttctctattattctctatgagccatattgtttcagcagatcactgatgacctcagataattagaatggcagattgaaatgacaaacttctaaccataagnaagtattataaaaattatatttattattctaataaaatagttgaagttttctataatgttatgtcaaataccccttttcaaacagattggggaagacagaaactattatttaccatcgagattacaaaagcaaattttggcttttgttgaaaatagaaaatagtaattatttttggagaaaaaaccaacttcaccttttttggctctgtctgncctatccttgctcagctcatcttttaatacaatttaaaataataagagtttatttatgagtaaantaaatctgacatggcaaag

SEQ ID NO: 496 - DNA, 401 bp, Artificial sequence
  /note="Description of artificial sequence: rs4904138"
aacgctctcaccagggatgccaacctacagcatcaaaggggcagagctgttcttaagagctcacacagaaactcctctgatcacccacccccaaaatctctaggaagccactagaccgtcagcttgcagcaccagtaggtctcattcttagatgctcatcagcaaatcactttgaactttgtctttgtcattggtccactcagtttttggcttttgcctttcctttccttacaacttccaaatgtagcaggaagttagttcaaagtcagaggaaaaggattctggaaagtgtagttcccgggttctcttctgagagaagcaaggaagtgtttaatttaggaggcggaagtggaggtgatgttgagggacacaaagaatggtccagctcatgaccaggtgca

SEQ ID NO: 497 - DNA, 401 bp, Artificial sequence
  /note="Description of artificial sequence: rs1952541"
  misc_feature (197)..(197): n is a, c, g, or t
  misc_feature (217)..(217): n is a, c, g, or t
cagaaaattgataattgtgtctcatttttctaataattacagtctgcacatttatctcatattggttattctatcatctgcaacaaatatacagaagaacattggtagaattaaaatagactatagtgttgtaacaaataactactgaatctatgtttttaaatgtaaatgtatcacttatgcaaggactgtcatanattcggacttctctttgggncagctgttccctttgtagcaactagacaatttttggttccattatgtcaaaacatagccatagtaggtaaagtgataaaaattcccatcaattataattacatatgcaattcaatgattaatgctgcagcatgataatagcattttataaaggaggacacatctaactattccatatcacattg

SEQ ID NO: 498 - DNA, 401 bp, Artificial sequence
  /note="Description of artificial sequence: rs1958451"
cacattttatttatctcttctattgtcattaaacatttgggtcattttcaaatttagactatcataaacattcagtattctcctacatgtctcctggagtgtgtttacaagcaattttgtaagttttatacctaagacagattttcttaacataggcacattgggatattttgagccctctaatttcttgctcttgtggtctgtcctgtgaattgtaagatgattagctacatctctggtctctactgacaggatgccagtatcactatgctgtccacacgctgccctcacagtcatgaacaattattgccaagtgtctcagggggaaaagtgtcaactgcccgtggttgagaaacactgacctaggaatatttctgaattctgtaaatagtggcaaacat

SEQ ID NO: 499 - DNA, 401 bp, Artificial sequence
  /note="Description of artificial sequence: rs1958449"
  misc_feature (94)..(94): n is a, c, g, or t
  misc_feature (371)..(371): n is a, c, g, or t
agcttgttctgtgcagtatcaacacaatcatcagccagtgtaatggagtgtattgattacttttgtcctaaattccttcctccctattggaatnggtgggttaggattgtctcctctagaaccacatgaggcctgcaatggaaatttgaattgttaggagggaggagagtatgaatacaataaaaatatttctacaataggcaccatttaacacgacatacactattttgaagcagcctagtgtcactgcagcagtctcattgtctgaggtattacctagagttctttgtctcacaaccaagaaaattaaggagtgtggacaccaacagagaggttggagtgacagtgtaataagaaaaagaggtaatctntccacaatggagaaaggacctgggagggtt

SEQ ID NO: 500 - DNA, 401 bp, Artificial sequence
  /note="Description of artificial sequence: rs1952538"
  misc_feature (162)..(162): n is a, c, g, or t
  misc_feature (394)..(394): n is a, c, g, or t
aatagctgtatgatgggtctgtttttagttttaagttgtaaatactaaacaaataaaaatcaacatgaacagatatacaatgtaaagcaaaggtttggcttcagtaaagacgtgataaagtgactccatcgtgctactttaaacctacattcattctgctcngtgtgtccctacatagactcaaggtggcttttattaaaatcagtggtacatgctttcgcattcatatccagaaggacagagaaaaatatttgtcttcacattgccttcaacaatcctatgattgactggtatagaatgagcttgttctgtgcagtatcaacacaatcatcagccagtgtaatggagtgtattgattacttttgtcctaaattccttcctccctattggaatnggtgggt

SEQ ID NO: 501 - DNA, 401 bp, Artificial sequence
  /note="Description of artificial sequence: rs2242166"
  misc_feature (68)..(68): n is a, c, g, or t
  misc_feature (182)..(182): n is a, c, g, or t
  misc_feature (314)..(314): n is a, c, g, or t
gagtgaactttagctgctacaagacttggaggtccggccccgggaatctctgagctatggccccctcncacggacagggcatgagctggggcctgcgacacccaacgttgactgctcagaccctctcgtccctgcctgggcccacacttgccatccccaggctcagccaggatttatggccncctgggtgtcctggcccaagaactccctgccccgggcacccagcctcctcccacctcaccctcccagtgcccactcgtcagatagctgatgctcgccacgcacatgggcctcaacttctagaggagtcccgngagggaaaggggttccccaagccacacggtaggtcgagtacacctgctcagcctgcagaggcggcctgccctcctgcctgtcctgtc

SEQ ID NO: 502 - DNA, 401 bp, Artificial sequence
  /note="Description of artificial sequence: rs2242164"
  misc_feature (183)..(183): n is a, c, g, or t
  misc_feature (217)..(217): n is a, c, g, or t
  misc_feature (294)..(294): n is a, c, g, or t
cacacccacacctgtcctcttggtctgaccgcggctgctccctgctctccgcaggctggacctgaaggacatccccaacgccatccggctggtggcccctgacctgggcatcttggtggtctcctctgtctgcctcggcatctgcgggcgccttgcaaggaacacccggcagagcccacatcnacgggagctggtgagggcagctgcgtcacccgtntgtcagggaggtcattcgagagctgtggtctcagccattttgagggttattttaatctttttaaaacagatgtagangttttggttgtaagttggtgttaaagagaggaggaagttccaaatcccaccccggggcccagcctgcagttccatccgttcagacctgtttctactcgggctctgcc

SEQ ID NO: 503 - DNA, 401 bp, Artificial sequence
  /note="Description of artificial sequence: rs4142598"
  misc_feature (28)..(28): n is a, c, g, or t
  misc_feature (272)..(272): n is a, c, g, or t
ctctattttttcctatcttatttatctntagttagccttgaacaaggaatgattctttttttctcatagaaaagagctaaaaacaggggaagttgaaattttgcggttgagaaaaacaaaatgttaaggtaaggtcgcataggatggcctcaattttctcaagaaaataagagatgagttcatctgggcttgagctactacgggctgctatcagtaattcattagggagttaacagatgaatatcagcattgctgcagaccagtgagaaatnaccaacagatctaaactcatatgacaaatggtctcacccaaacacagtggatttgcttggaatggtggcatgccaattttcattattggcaaagaacaaaacacccaaaagccaaaagggacaggtaca

SEQ ID NO: 504 - DNA, 401 bp, Artificial sequence
  /note="Description of artificial sequence: rs2025949"
  misc_feature (99)..(99): n is a, c, g, or t
gacatctcaatttccaccctcttcataaaataaacaaacacacaaactttgaaatacaataaagctattagttaaccactggcaagtttgctacaaaanggcttatcaatgatgaatttgccttttgatttatttatcattgtgaaatactgtcaaccctcatttacaaattagaattcctaaaccaaactggtaaaactaagattcttaaattgaacaaaactattaaatgctatactgtagcattaaatatttacagcattttaacttttatatttttgtatgtaacactgaaaatttttataatggcttttgttctaatttgcatattgaatatacaaacgctgaacaggagagaaattaaaagaagtgatgtcttttccaagttaaaatctctctgg

SEQ ID NO: 505 - DNA, 401 bp, Artificial sequence
  /note="Description of artificial sequence: rs2131301"
  misc_feature (92)..(92): n is a, c, g, or t
  misc_feature (112)..(112): n is a, c, g, or t
tttctgatgggaatgctgtagaaaacagtttagtagatactcaaaatgttaaactacatgttccagtaattctactttcaggtatttatacncaagggaattaaaaacatanacatatacaagaacttgacacgaatgttcacagcagcattatttataacagtgaaaaagtggaaacaatccaattctccatcaactgaaaaatggatacataacatgtagtatattcttataagggaacattattggcatgaaaagaaatgaaatacttacgcatgctacgatatgatgaacttgaaacattatgctaagtgaaagaagccagtcacacaagcctgcatattttgtgattctgtatatatgagatgtccaggataagcaagtttacagagacagaaagt

SEQ ID NO: 506 - DNA, 401 bp, Artificial sequence
  /note="Description of artificial sequence: rs2325528"
  misc_feature (256)..(256): n is a, c, g, or t
  misc_feature (369)..(369): n is a, c, g, or t
ccttctcacatgcaaaatacatccattctattccaacagttccaggagtcttaactcattcctgcactaattctcattatgttcatttttgtctagtcaggaattttaattggacagctttccatttacacttactgtaattattaatttgctttatctttttttatcacttgttctgctgtctctcaattattgtcaccatttgagttaataatataatttatagtatttcattttaataccttttcagagttcntaccatactgctttgtgttatgtgtttaataactattcttaggatttacatatacaatcttgtactattatttactagaatattttatcttttcatataagatggatacgtcntgaaatactataagttactcccacttttgatg

SEQ ID NO: 507 - DNA, 401 bp, Artificial sequence
  /note="Description of artificial sequence: rs1984151"
  misc_feature (18)..(18): n is a, c, g, or t
  misc_feature (106)..(106): n is a, c, g, or t
  misc_feature (268)..(268): n is a, c, g, or t
gacaacattctgatcagnttttcttttcttttttatactcctttaatttttgcagttttctttagattgtgccacctcctggtctagctgtttctttgtgaatttngtaataggctctctgtttgaattctatggtgttattccaaacattgctgccttctttttgaagtatgtggctcacatttcacacagatcctttacgatgatttccttgcatagtgggaagtttttgacgtgaaggtttactggagtcccttggctttcaagntggctcagagcagatggtactgctagagagagcaacaacacagctttgggcttgaaaatgttagtgtacacacgatgctttttcccctcaggactggtatgattgatgggactttggaactaaaaactgagaa

SEQ ID NO: 508 - DNA, 401 bp, Artificial sequence
  /note="Description of artificial sequence: rs2152543"
  misc_feature (289)..(289): n is a, c, g, or t
  misc_feature (384)..(384): n is a, c, g, or t
agttaattcaatcatatgctttcaaaaagatttaagtattgattattacttaagataacttgaaagtatgattctatgtaatatgagacaacttttgttgaaaaaatatttttatctattttcaaaaatgtagaaagcccttttaaaagcaggatcactaaagtatgcttacgtttatttaatgacaacattctgatcagcttttcttttcttttttatactcctttaatttttgcagttttctttagattgtgccacctcctggtctagctgtttctttgtgaatttngtaataggctctctgtttgaattctatggtgttattccaaacattgctgccttctttttgaagtatgtggctcacatttcacacagatcctttangatgatttccttgcata

SEQ ID NO: 509 - DNA, 401 bp, Artificial sequence
  /note="Description of artificial sequence: rs4707810"
  misc_feature (215)..(215): n is a, c, g, or t
tttttttattacttctttactactgattcaaatctccattgatataatttccttcttcctgaaaaactttgtgttagcatttgcaaaatccagcatgcagtttctatagattatggtgatataattatctcaaatttcagtaatttggtgttgccttcatcttgccttaatttttaaaatatatttttggtggctaaagaatattaagttgaaancattttcttttaccctccaattatatcatttcttttgtcttcccagctccttgtttctacacacattctcctgtgtgtaatgtattttttatctggatatttaaagacacttttattaattcttgttttaggactattatgactatactctacctagatatggttttcttgatttatcctgcatag

SEQ ID NO: 510 - DNA, 401 bp, Artificial sequence
  /note="Description of artificial sequence: rs2000361"
  misc_feature (40)..(40): n is a, c, g, or t
taatcttttatttcaaatatcctaaaattttgtcataaangtagttatgaattatgattctgaagtggaagaaatcacttgtgtatgttaaggtaattaccacctgtaactctgggcattgtttcccaaatgcactgcatgtcttttactgcttctgagcatgactacatcatttttaacataaaatctaattaatcacaccacagagagtgtactaaacactttgtaatgtggaaacaattacacgtgattaatggatgaagtaaatttcaactagaaagagggttgcactgcttgtaaaaacatgcaggtaagaggaagttctgcaggttttcttgtagctagacattagaaaagtttttgaaaatggtatatccttcttctgataagctttgtaaaag

SEQ ID NO: 511 - DNA, 401 bp, Artificial sequence
  /note="Description of artificial sequence: rs2248260"
  misc_feature (394)..(394): n is a, c, g, or t
tagaacttgttggtgcatttgaaatatagaagccagtatggctggagtggaaggagaaaggaggaggtgattaatagttgaggatgtcaaagagggtaagatgggacagagctcaaactatgtagatccttgtaggtcatggttagggataggacttttacattcagtgaatcaggagcctttgtaggaatttgctccaaatgaggagatcaaatgagttctgtttggaaaggaacacaacttcaaatcaataaaggaattgcaaacaacacaatcacacagtgagtaaaggatataaatgaatgattcaccacacagaaaaccagagtaatttataaccatatgaaatatgctaaaactcactgacaatgagttatacaaaataaaaacttanaaaatat

SEQ ID NO: 512 - DNA, 401 bp, Artificial sequence
  /note="Description of artificial sequence: rs2801552"
  misc_feature (96)..(96): n is a, c, g, or t
  misc_feature (176)..(176): n is a, c, g, or t
gatgaattctgctgaggaacaataagtgattactagggagaatgaatggcccagaaaacagagattaacttctaaatagttttctttggaatttgnatgagtgggagacacagaggttatcttgtgaaacggtttgttaaggtgtgtttgcattcttggtcttacagagaggaganaaaacaatgttctctttggtggttctggatcttaggcagataaaaaaattcaatttcatcctgctctttcagagggatggaggatgttaggtgtgtagagaaggtttgagagaccttgaagcttcttcagttcagcctgtcaaagtgccatattttggagtgtctgtttctgatcccccgacaatgtcaataaaacacagcctatatgttttacatatacaattc

SEQ ID NO: 513 - DNA, 401 bp, Artificial sequence
  /note="Description of artificial sequence: rs2801556"
gactagagtacactttcaattctccccatatcctttctatttagaggtttcataacatggaactgttccctctaaattttgcaatgcattttttgattctaatcttacctcattccaattggcttttcagatatttctagtactactgtcatcattctatattaggatctccagtctaccactttttatgagtcctctcactagcttttttctttcctgtcacaatcttcctccacagcttaaaatcctagatcaattattgtaactttcttacaacacataaactttatttaccctctacttttgttgcctcagtagtcaaaagtgtaaccctgaatgaatgcaattagtgttagattttatttttgcctatatcaaggggagtcaaacactactggaat

SEQ ID NO: 514 - DNA, 401 bp, Artificial sequence
  /note="Description of artificial sequence: rs2633619"
  misc_feature (102)..(102): n is a, c, g, or t
  misc_feature (225)..(225): n is a, c, g, or t
  misc_feature (399)..(399): n is a, c, g, or t
aataaaatttaaataaattataatttaaaaattgttaggaaaaaatagttaaattattactcatttacattatgaatttaaattttttaatttgttttctangcatgctgatatttatgaaaaagtataatagtcaattcaccaaaaaaaaaattaagtgctaaaagacagtgtggcatacatacacaaggacatatgtacgaaaatccttaaaagatagtcagnatcacagaatggaaattatatcaactttggagcaaagaacctgactcaaatccctgttcatttgtaatcagttttgtgaagattgtcattcatgtaacctcgctaaagctgtttattcactagtaaaatggataaaagtgtaattttgaagttttcgtaggaggataaaaatangg

SEQ ID NO: 515 - DNA, 401 bp, Artificial sequence
  /note="Description of artificial sequence: rs2801559"
  misc_feature (186)..(186): n is a, c, g, or t
  misc_feature (264)..(264): n is a, c, g, or t
  misc_feature (310)..(310): n is a, c, g, or t
  misc_feature (313)..(313): n is a, c, g, or t
gactaatggatttcaaaagattttagacaggaaaattactgactaaaaatagaagaaaatcaagtatctccaggaaagggatcattctcccccagatatgtagaagtcagttacagtagccctaataagctttagaagatcaaaaaataaaaaataaaataaaatctggtgacagtaattttaggnaatcattaaaagaaactgaagatgtgggtggagctgagaacagtgagtcatatcatctttcctgttttatcatttagnctttttgtgcatagaaccagaaggcacttgcatttgctaagagaangtnttgttgctttcttgtactatgcaaaatgcagatactgactacacaatattttagtaaaataaaagactgaggcattgtttacaaattc

SEQ ID NO: 516 - DNA, 401 bp, Artificial sequence
  /note="Description of artificial sequence: rs2860905"
  misc_feature (243)..(243): n is a, c, g, or t
  misc_feature (269)..(269): n is a, c, g, or t
  misc_feature (378)..(378): n is a, c, g, or t
aagggtgggtgaccctactccatatcactgaccttactggactactatcttctctactgacattcttggaaacatttcaggggtggccatatctttcattatgagtcctggttgttagctcatgtgaagcgggggtttgaagctgagagccaagggaatttgcacatatttgtgctgtgtgtgtacaggcatgattgtgcatacagtgtgggtataaaaggttcatttaatcccatgttctcntgaactttgcttttttgctttcaaanaagaaatgatgaatatagattttgagttcattttttgaaagagttaaagagcagtgtttttcccattacctattccagaacatgtcaccagagaatacttgacaagtcnacatggtgggaatggccctatca

SEQ ID NO: 517 - DNA, 401 bp, Artificial sequence
  /note="Description of artificial sequence: rs4086116"
  misc_feature (74)..(74): n is a, c, g, or t
  misc_feature (284)..(284): n is a, c, g, or t
  misc_feature (302)..(302): n is a, c, g, or t
  misc_feature (401)..(401): n is a, c, g, or t
gcatattattcatttatatttgttttccttctcataaaacacattctgctcttacatttattttcttaaatacntgaattcaccaacagtctctttggttcctctctactggttcaacacatgactctttcagctattcattatatataaaaagctttgaaatctccaactattcttgccctttccatctcagtgccttgctgtctactgactttgcagactgatgtgattccctctgaaacatgaattattaggtttttagaaaatgcctttttgttctttcnaaagtaaaagacaaatangctgggaatgtaaatttagcatttgaacaaccattatttaaccagctaggttgtaatggtcaactcaggattaatgtaaaagtgaagtgttgattttan

SEQ ID NO: 518 - DNA, 401 bp, Artificial sequence
  /note="Description of artificial sequence: rs4917639"
ttatttcacttagcctaatgttatgttctcagggttcattcatgtttttgcatgtgtcagatttttcttcctttctaagggtgaataatattccgttgtatgtataaaccaagtttgcttacccatttatctgttgatgggcacttggattactttcaccttttgactttttgagtaatgctattatgaatatgggtaaaaaaatatctctttgatgtgctgctttcaattcttttgggtataaataacccaaaagaataacccaccacgcctggttaattttttgtatctttagtagaaactgagtttcaccatgttggccaggctggtctcaaactcctgaccctgtgatccacccacctcagcctcccaaagtgctggaattataggtgtgagccacg

SEQ ID NO: 519 - DNA, 401 bp, Artificial sequence
  /note="Description of artificial sequence: rs1934963"
  misc_feature (107)..(107): n is a, c, g, or t
  misc_feature (149)..(149): n is a, c, g, or t
  misc_feature (315)..(315): n is a, c, g, or t
gagagggtaaacttataaccaaaaggtcagaagagaaaaatttatcaaggatgaaaagttaatcagtgtcccttaaatcctcccaatattggtatttggaagtaccnagggtcaaagatggtggagaatgaggctgaaaaaggaggctntccctgcctacgtttcctccacaactcttttcatcaggtaactgatttcctcccacaagaagaaggaggctcactctctagagaaactgagcttaagaagccctgtactcagagacacacagcagtgccagaaaaggcatgaggtgtaggctagaaagacagattnggtacacatccactccttgaattcagagactcttagctcttttattcatcttccttcctaaaattcagcagctagctctatcctac

SEQ ID NO: 520 - DNA, 401 bp, Artificial sequence
  /note="Description of artificial sequence: rs4918797"
  misc_feature (132)..(132): n is a, c, g, or t
tacaggtgccaacccccataccaggctaatttttgtatttttagtagagacagcatttcaccatgctggccagactagtcttgaactcctgacctcaagtgatccacccatctcggactcccaaagtgctgngattacaggcatgagctaccatgcttggctgggcaaaatttctaagaagaattacaaagatttaatctctctcagcttctcctacattattttacttttaacataagtgggatgataattttatgctatggtcctaaatataattagcctcatgtcatctccaaagaatagacaactaagtatcttatgttaaattatattcaccacttttcctgtcttctacttgaaatgtaagaaataagaagtaacataatttgttatgcttctca

SEQ ID NO: 521 - DNA, 401 bp, Artificial sequence
  /note="Description of artificial sequence: rs2297971"
  misc_feature (90)..(90): n is a, c, g, or t
aggaaatcaatagaccaaatcaataggccttggtgattaactagtcacaaagcttgaagaaggattattcaaaaaggacttgagggcttnaagctccactggctgggcaaacggtggcacccatgagaagagcaaggaaggctggaggctggggaagtcagaaagaacgtggagaaagaagtttgtttcccaaatgcaaacttaactgacttattatgaatattattttgccacaagcagaaatgcaataaatatatccaaatatttttgaagaaagaactctgtttgccagaagcattgtgtttattttatagcaggccacctctaaaaatcagacttcttgaataggagtgctcaagttgcatattctgtgcatgtgtgtggtttttcccattgtagct

SEQ ID NO: 522 - DNA, 401 bp, Artificial sequence
  /note="Description of artificial sequence: rs2066202"
ttctgtgcatgtgtgtggtttttcccattgtagctgggttgtatatgatggagaaaatttcactggtaatcaatacgtgttggaagaaggccattatccttgtctgtctgcaatgggatgcccgcctggagcaactttcaagtctcttcgttttatagatgttgtaagtatgtcattgtgaatagtgttgcagaaatgtacgcctcatatagctgatggtcagagtgaggtaaccagccggtagaacctgctcttaaagttagttaagggcttggagatggaactgtccatttggctctgtgtacatctagtttattgattctaactggtacacgttttccaccaccctgttttactcacttaatcctcatatgcatatccctatggacctgagtgggagt

SEQ ID NO: 523 - DNA, 401 bp, Artificial sequence
  /note="Description of artificial sequence: rs2054366"
  misc_feature (81)..(81): n is a, c, g, or t
  misc_feature (121)..(121): n is a, c, g, or t
  misc_feature (153)..(153): n is a, c, g, or t
taactggtacacgttttccaccaccctgttttactcacttaatcctcatatgcatatccctatggacctgagtgggagtcncttggactatatattaggagtagaattactggatttcacntgtaagaacaggcagtttcattcagtactgcnagatcccaccacttgagactcccaccagcagtacacattgttgccatcactgaatattctctcattctaatttttgtcaacttgatagaatgagcagaaagcagtatgtcgtcattgggttaatttgtatttcactattagtgaggctggtatctcttatttataatttgcattttctattcaaggaattgtgtattgtatcctttgcaatttggcttcctctacctttggttgttattattgaagaa

SEQ ID NO: 524 - DNA, 401 bp, Artificial sequence
  /note="Description of artificial sequence: rs2615206"
  misc_feature (261)..(261): n is a, c, g, or t
  misc_feature (373)..(373): n is a, c, g, or t
ttgcattttctattcaaggaattgtgtattgtatcctttgcaatttggcttcctctacctttggttgttattattgaagaaattccttataggtttttagtctattattattctgtgttttagagatttgcaatcaaatgacttctcccagtttgccactatgtgctaatccagattatagtgccctcttttggacagaaatctttcagtttgatgtagtggaagtaatattcaatagaacaaaactgcaagatcatgttnagatattaaagtctggaagtatctgtcgtttctgacatttttattagtttttggtaactgctttctcataaaaagctttaaacacacgtaattgctcattttagttttaaangtaggaagaacgtatgtgagttggtttt

SEQ ID NO: 525 - DNA, 401 bp, Artificial sequence
  /note="Description of artificial sequence: rs2615207"
  misc_feature (141)..(141): n is a, c, g, or t
  misc_feature (313)..(313): n is a, c, g, or t
ttggttgttattattgaagaaattccttataggtttttagtctattattattctgtgttttagagatttgcaatcaaatgacttctcccagtttgccactatgtgctaatccagattatagtgccctcttttggacagaantctttcagtttgatgtagtggaagtaatattcaatagaacaaaactgcaagatcatgttcagatattaaagtctggaagtatctgtcgtttctgacatttttattagtttttggtaactgctttctcataaaaagctttaaacacacgtaattgctcattttagttttaaangtaggaagaacgtatgtgagttggttttcatctcatccctgcctgcctgtttaaatagcaaaaatgctactgagacatgaaaatagta

SEQ ID NO: 526 - DNA, 401 bp, Artificial sequence
  /note="Description of artificial sequence: rs2642469"
  misc_feature (29)..(29): n is a, c, g, or t
  misc_feature (89)..(89): n is a, c, g, or t
agattatagtgccctcttttggacagaantctttcagtttgatgtagtggaagtaatattcaatagaacaaaactgcaagatcatgttnagatattaaagtctggaagtatctgtcgtttctgacatttttattagtttttggtaactgctttctcataaaaagctttaaacacacgtaattgctcattttagttttaaaggtaggaagaacgtatgtgagttggttttcatctcatccctgcctgcctgtttaaatagcaaaaatgctactgagacatgaaaatagtaacaaagaaacatgaaatgaggtagtaagattcattagcttacaagtaatgaataagactttgattgttattctgcctagaattctaaaagctacctacaagtatatatttga

SEQ ID NO: 527 - DNA, 401 bp, Artificial sequence
  /note="Description of artificial sequence: rs4946764"
  misc_feature (172)..(172): n is a, c, g, or t
actccttccctgccccaataatctgggctcagtttctggtgctaagaggtgtggctgcttcagaaggccatcaaactgaacatcaaacgcagttatccacaggcaggcaccctgcctcaggcgctttgacattttgtcaaactcttctcattgagaaaatttaaaacctctnagactcttgagtatggtaattacccttaatccatatctcactttggattcttcctgatattcatgcttgttcagtgcttccagcagcacatctggtataacaactgctgggggttttgtcttctagaagcgaatttatttcagacttcgaaacaaagcaacagggttattcatgtcaaccaatggaaacttagaggatctgaagcttctgaggatacaggtcatggagg

SEQ ID NO: 528 - DNA, 401 bp, Artificial sequence
  /note="Description of artificial sequence: rs3747790"
tggatcgactcctccttcattgattctaaattcaaccttaaatcatgctgccatgactcagagaacttactcatcgtttcaaaagactatcatagctttaaaccaataatttgtcctcctttcatttcttgcctttcatttttggtagctgcttaaacaggttgcctaattagcagcttttgggtgattttgtaaaatgtcatatcaagatttcaagactgtgtacattttaaattatttccaaagatagtgacaggagagaactggaacaaatttaccaactttgtggacctacaaagcccttacactttaaagggtaagacaaaggcttaagtttgaaaggtagagaactgtttagcatctgagaagaaatactttattaggcctgtaattttggttct

SEQ ID NO: 529 - DNA, 401 bp, Artificial sequence
  /note="Description of artificial sequence: rs4523123"
  misc_feature (233)..(233): n is a, c, g, or t
  misc_feature (385)..(385): n is a, c, g, or t
ggtgggaggatcacttcagcccaggaggtcaaggctgcagcgaggtgagatcacaccactacactccagcctgggtgacaaagtgagaccctgtctcaaaaaaaaaaaaaaaaaaaaaaaaagatcttcctcccatacttgatttctagccatctggtttcccacctcaggagcaaccaaggtttctagttgctctcataacctttttgaagtattttatgcattgtggtagncagaataatggcccccaaagatgttcacatcctgattcccaaaatgtgtgaatatggcaccttacatggcaaaaggactttgctggtgtgattaagttaaggatcctgagatgcagagattatcctggattatccaagtgggcccagtgtantctcagggtccttata

SEQ ID NO: 530 - DNA, 401 bp, Artificial sequence
  /note="Description of artificial sequence: rs4945759"
  misc_feature (9)..(9): n is a, c, g, or t
  misc_feature (16)..(16): n is a, c, g, or t
  misc_feature (391)..(391): n is a, c, g, or t
ttattaganaaggggnttcgccatgttggccaggctggtctggaacccttgacctgaggtgatctgcccgccttggcatcccaaagtgctgagattacaggcatgagccaacgcgtccagcctgaatactttcacaaaataacactgcccctcatatcactgcccctcacatattattttgtctgctcaattatacagttaatgtaggaaaggcaagacaaatgcttaactgtttttctttatcagtttataagataataaattggttccctatcaaattccaaaagtgacctcttttgaaaaaagtatcatgaactcatggatttaaatatatttaaaaggtttcaacccattgtaatggtcattattattactgaagctcaaactgttncatctttggg

SEQ ID NO: 531 - DNA, 401 bp, Artificial sequence
  /note="Description of artificial sequence: rs2348427"
caatcagcagaggacatagtacttggagttattttctaatagtgacagtgagcttgaatttccaatatgactctatcaccaggtcctctgaccaaggacatttacttgtaatattatactaactaggtaaatcactagagcctgtaccagttagttagctgggttcttaggatggattttatataaaggatttgaagtgacataatgaaaaaatacagttttgcaaaagatcccaaaatgtcctgtaggtggtaattatttcttaaatggttcttctatgaaaactaagagcataacattttgttttaaataagtgatgcattccatcatttgggagggaaacaaacataatattgttttaatacattactgtccaatcatctattttataagagatcaac

SEQ ID NO: 532 - DNA, 401 bp, Artificial sequence
  /note="Description of artificial sequence: rs2881913"
  misc_feature (211)..(211): n is a, c, g, or t
agtaaatgaaatcactgaatttcaccccagaaaaacaaacaagtggacacaccctgaactgtgcatagtatagagagattatatgactttttagttatgtgaacaaactgttgagttattgtttaaaaaaaatgtaatcctattgttcctgcaggagtcatcagagaggaaacaatatccccaataagcatgtcatgaacatgagagttcngcacaaagttccccattggaatttattgcaattcattttcaaaccaagaacaatgtacattataaatatatttttgagtttttaaaattataggtttaattcatgtacattattgaaaatttggaaaacgcaaagtaggaaaaaggaaaatcccccgtattagtatatataaaatcatttgaagttgtta

SEQ ID NO: 533 - DNA, 401 bp, Artificial sequence
  /note="Description of artificial sequence: rs2348429"
  misc_feature (241)..(241): n is a, c, g, or t
ttttatttaaatttacaaaaatataaacaaaataataaaaataatgtaagattttatggggtaatttagattttttaatgttcattttttaatttcttaaaaattatactgcagtaataatcactaagcatcagacaacttaaattttaacttaaatggaaagtaagtggccaataaatgctttgtgtaacctaatggccatgctgagtttcttcttaaacagcaattcatagcaggtganttccgactcagagtccgaacatgttttgaaccagcatagctacagcggaaaaaaaggtgttttttcacctaaacttcaaaccaaggttttgcatattcatactaatttatctatgaggaaggagcaaactaaaatttagaaagaatatatcacattgata

SEQ ID NO: 534 - DNA, 401 bp, Artificial sequence
  /note="Description of artificial sequence: rs2348431"
  misc_feature (32)..(32): n is a, c, g, or t
ttattttgtctttcagttcctgtactgttatnttgtaatccttagtttccttggattggtttcaactttctcaatggttctcaatggaatctcaatgatcttccttcctatccatattctgaattctattgctatcatttcagtcgtttcagtctggttaagaacccttgctgtggaactagtgtggttctttggaggaaacaaggcagtctggctttttgagctgccagagatcctgcactagttctttctcatctgtgtgggctgactttccctcaactgtggtggctgatgttccctcaactgtgctgtaatttgagtacagtcagttgatttctttcctggatgttttcagaggacgaagtgtttgtgctgggtcattatttgcgctgaattcatgt

SEQ ID NO: 535 - DNA, 401 bp, Artificial sequence
  /note="Description of artificial sequence: rs3796889"
  misc_feature (226)..(226): n is a, c, g, or t
taatattttatgaaaagttgctggaaatctgtaactccaagatttatgtgacacattctgtcccacaatatttcatatagtctctccttcaaacatattccacatctgtatgtaacataatttaaattttattttagtcattttctacttcagcttctcatgggtttcccactacactgagatgcttagaagctactgcaagctaatacattttgttatcctgagnaatacctaaagtcttatttgagtcaaaaatattataattattaaaatgaatacttgagtgaaaaagcttctatgtattagcatttgaaattcttagcatcatatttttgactttccctctcatatgattcccatggtgtatgttcagccttcttgtattcatttttctttgatat

SEQ ID NO: 536 - DNA, 401 bp, Artificial sequence
  /note="Description of artificial sequence: rs3796888"
  misc_feature (226)..(226): n is a, c, g, or t
ataaagataaaaggaatcattcataatatcaaagaaaaatgaatacaagaaggctgaacatacaccatgggaatcatatgagagggaaagtcaaaaatatgatgctaagaatttcaaatgctaatacatagaagctttttcactcaagtattcattttaataattataatatttttgactcaaataagactttaggtattactcaggataacaaaatgtattagcntgcagtagcttctaagcatctcagtgtagtgggaaacccatgagaagctgaagtagaaaatgactaaaataaaatttaaattatgttacatacagatgtggaatatgtttgaaggagagactatatgaaatattgtgggacagaatgtgtcacataaatcttggagttacagatt

SEQ ID NO: 537 - DNA, 401 bp, Artificial sequence
  /note="Description of artificial sequence: rs2348433"
  misc_feature (177)..(177): n is a, c, g, or t
cttgcagttatggaggctggaaagtccaagatcaaagtgctggctgattccgtttctggtgaagcctctcttccgggcttgcagatggtagacttcccactgtgtcctcatagcagagagagagagagggagagagagagagcactctggtgtctcttataaggatactggttccancataagagtcccagcctcacgatatcatctaaatgtgacagctcccaaaggcttcgtttctaaatactatcacactgggggttagggcttatatgaatttcagggaatacgattctttccatagcaacatgatataaacatctaaatttatctataaaggtcattccttatactgagtacaagacttttcccttattattagattagaaaagatcaatattagt

SEQ ID NO: 538 - DNA, 401 bp, Artificial sequence; identical to SEQ ID NO: 9
  /note="Description of artificial sequence: rs2774089"
  misc_feature (18)..(18): n is a, c, g, or t

SEQ ID NO: 539 - DNA, 401 bp, Artificial sequence
  /note="Description of artificial sequence: rs2576497"
  misc_feature (18)..(18): n is a, c, g, or t
  misc_feature (310)..(310): n is a, c, g, or t
gacatgagggtcacttcnaacacggccagtgtgcagcctcccaggtccctgaggtcggcgtctccgggtcaacccttagtgacatctccaggcccaggtggccttgaagtgtggacacaggtgggcaccactgggacaagcagccgttcccacaccagcagccagttcccacgccagcagccagttcccacaccggcagtacccacacccagggaaagggagaccgtgcccggggctggcccctcgggacggcctaggcgtgagtgccagtgacataaccaattctgaggaaattgcaaaagacaaggcntgcactttgagtggttgcgtaacaggctgtgaagggcctctgcctgaaatgcttgtatttttcagaaagccttgttacaacctgccataac

SEQ ID NO: 540 - DNA, 401 bp, Artificial sequence
  /note="Description of artificial sequence: rs1946770"
  misc_feature (342)..(342): n is a, c, g, or t
cctcctcttcctataaggacactggtcctactggatgagggccaacccctatggcttcattttacccaacgatctctttaagaccccactgccaaatgcggtcccattgggaggtcctgggggtgagggctgcagtgtatgaaagtgggggagacgcagtgcagctggtgacgcagccccgcagagctgagcgcgttgcccggcacacactcgtgccgactcagtgtgcggctgggttggtggcccctcgaaggcgtctgttaaatttgtttatttctagcatcgcagagtcaccaagaaagcgaggctggagctccactctctctgtgggtttgtcgtcangcagtgcagctttctcacagagtggatcaaagactcaccacactttaaaaaaaggaaga

SEQ ID NO: 541 - DNA, 401 bp, Artificial sequence; identical to SEQ ID NO: 11
  /note="Description of artificial sequence: rs4907674"
  misc_feature (66)..(66): n is a, c, g, or t

SEQ ID NO: 542 - DNA, 401 bp, Artificial sequence
  /note="Description of artificial sequence: rs4682298"
  misc_feature (72)..(72): n is a, c, g, or t
gctaaaaataccaaccatgaagggtaattgagaagacaaaataagaaaatgcttaggaagcattttagcacngagcatggcacatagtaaatactccatagtagctcttagtcttagtaataagggactttgcaccctcctccttcaaatggcacccaacgatcacttcaacatgattgctaacctttgtgttaattggtagatgatttagcaggaactaattaatgagaggtaagtcaatataaatttgacagtgaaagaaaacgtgaaatccctttgtgtggcaaattcttgaggctctgcagtggaaggtcaaggcagctggatggtgctgagtgattagacttggtcattcatctctctgtctttctctctctctgtctttctgggtgtgtgtgtgt

SEQ ID NO: 543 - DNA, 401 bp, Artificial sequence; identical to SEQ ID NO: 20
  /note="Description of artificial sequence: rs2980872"
  misc_feature (205)..(205): n is a, c, g, or t

SEQ ID NO: 544 - DNA, 401 bp, Artificial sequence
  /note="Description of artificial sequence: rs2954006"
tccagccaggcgagtgccctcgatggctctgtgcacacagagggtgccctgacttagagacacatttgcgtgtcccccgtgtctgagacacgggcggtgttccgaatccacttgctgagcatccccgggtgctgggcagaggccctcgggctctctccctctctgtctgcctcagacaaggtggagctctgccctcctggctccggaaagacacctcatattccccaacccacgtctgtgcctctacccgggaactgcccccttcaacagcctttctgttccgcagttactcacacggattcctgtgctgggtgaacgacaatgggccacaacccacctagtgcttcccgggaggagctggcagaggggctctgagtcacctgcaggtcagttcacaggag

SEQ ID NO: 545 - DNA, 401 bp, Artificial sequence
  /note="Description of artificial sequence: rs1914603"
aatttatgatactgaatgaccaagaagataaattctcatggtaattcttccattgtatgtggatagaatagaactgcaatatactagttactaagtagtttcgtagagcactgaaaaatcacatcctttcacattagttacattacttttaatgtgacatctatttgcctccaattgtctcttgaacactaaaattgcaacaacttttcctaaatggactgaaaataataaaaaattcatattaagtgaaattcatctttgtaactctgccactttccaaatctgcctttttcttttccctaacagaacactacattttctttgattttagaacctttgtgacttccagttcttctactctatactcccagatgaattctcatttgaattatctcctgtca

SEQ ID NO: 546 - DNA, 401 bp, Artificial sequence
  /note="Description of artificial sequence: rs4864386"
  misc_feature (94)..(94): n is a, c, g, or t
gacagatatttaattgtgattataattttgcattttcatggtttctattgaaattgaaaatattttcatatattcatgggctatacagtccttnaaccaggaaagtgagttaatatatttgctcttttaatactttagtgtttctacatttcatttttgattcataggagggcattttgaaatctagatactaattctctacaagttttatgcattttaaatacattctttcagcccaaacttaattcttaatattttaatggtgtcatttcaggcaaagcactaaatttttaataatcaaaattaaaatgtttaatattttcagatcttattaaatactccgtaccctgaattcataaagaaaattcatattttgggctgggtgtggtggctcaggcctg

SEQ ID NO: 547 - DNA, 401 bp, Artificial sequence; identical to SEQ ID NO: 96
  /note="Description of artificial sequence: rs4388301"
  misc_feature (119)..(119): n is a, c, g, or t

SEQ ID NO: 548 - DNA, 401 bp, Artificial sequence
  /note="Description of artificial sequence: rs4726029"
aggaagtaccctgttctcctaatcaccaagaatccccctcccccatcactccagtgacttccactatcccacgaaaccagaacacaccaactgccagcgtcccaccacaccaccttcccagctctttctctagctatcctgaagcaacaattctcagccccacaaggggcctgatttgttgaccctattattacatctcccctgtcccttaaccacttcttgctgctcctttccctctcggtcagctcagactcagcaggccaccatggcgccactgtacttcaactcccttccctaccaactgtcgctggcacggtgcccgcggccacaccgtaaacgctgcccagggaaaacacacaccgctcactgctgacctcacacccatgaccaggaacctggcg

SEQ ID NO: 549 - DNA, 401 bp, Artificial sequence
  /note="Description of artificial sequence: rs2074998"
gatgttctgttagttacaccaataggataaaaggctctttcttacctcaagctacctagaaaaacagtggttcagcatgatctaagcttttctgctaattgaaatgggaaatgcctaaattaattttactttgtgtgtgtttttaccatattaaggtgaaatagactttctaataaaatgtgggggtttgggtttgttcaatatcttatcctttgaatttatgaaataagaccttttggtaatagagtctgactttactacataaaaacaaagccactatttttattaataagaatggatatcggttcctctagctacgtatttcatgtctcctcttatcgggggatggcatgtattatcaggaggagcagtggtctgtgtctgttaacagaacagctggc

SEQ ID NO: 550 - DNA, 401 bp, Artificial sequence; identical to SEQ ID NO: 52
  /note="Description of artificial sequence: rs2074997"
  misc_feature (223)..(223): n is a, c, g, or t

SEQ ID NO: 551 - DNA, 401 bp, Artificial sequence
  /note="Description of artificial sequence: rs2299961"
  misc_feature (184)..(184): n is a, c, g, or t
ttcacatatcaaggggaatctcacatcaacacgcaaagaccaaccacccaatagaaaaaaaatggccaagtacacagacaggataattcatagggggaaaaatacaaacatcttctaacataggaaaaatcaaagcccctcctaagaagaaaagtgcattattaaaagtacactgcatttttanaagtacactgctttttctcacctatcagattggtaagtaccaaaacgtttgctaacacatagtgctggtgagggtgtagggaaatagacactctcattcactgctggcaagaacatgaactgtaaccctatgatagcccacatccaggaagttttcctatgtgcattattaccctatgtctaaaacaacgtccgggatgttcattaagggactgctg

SEQ ID NO: 552 - DNA, 401 bp, Artificial sequence
  /note="Description of artificial sequence: rs2299962"
  misc_feature (218)..(218): n is a, c, g, or t
atctcacatcaacacgcaaagaccaaccacccaatagaaaaaaaatggccaagtacacagacaggataattcatagggggaaaaatacaaacatcttctaacataggaaaaatcaaagcccctcctaagaagaaaagtgcattattaaaagtacactgcatttttaaaagtacactgctttttctcacctatcagattggcaagtaccaaaacgtttnctaacacatagtgctggtgagggtgtagggaaatagacactctcattcactgctggcaagaacatgaactgtaaccctatgatagcccacatccaggaagttttcctatgtgcattattaccctatgtctaaaacaacgtccgggatgttcattaagggactgctgatggtagcaagaccagc

SEQ ID NO: 553 - DNA, 401 bp, Artificial sequence; identical to SEQ ID NO: 70
  /note="Description of artificial sequence: rs3753151"
  misc_feature (91)..(91): n is a, c, g, or t
  misc_feature (266)..(266): n is a, c, g, or t

SEQ ID NO: 554 - DNA, 401 bp, Artificial sequence; identical to SEQ ID NO: 86
  /note="Description of artificial sequence: rs2299965"

SEQ ID NO: 555 - DNA, 401 bp, Artificial sequence
  /note="Description of artificial sequence: rs2284264"
  misc_feature (257)..(257): n is a, c, g, or t
cccaggctggagtgcagtgatgcaattttggctcattgtaagctccgcctcccaggttcacaccattctcctgcctcagcctcccaagtagctgggactacaggcaccgaccaccacactcggctatttttttttttttttttgtatttttagtagagatggggtttcactgtgttagccaggatggtctcgatccctggccttgtgatctgcctgcctcagcctcccaaagtgctgggattacaggtatgagccgncgcacccagccacaaacctctatgatcttaatctaatcaactgcctttgtgagcctattgagctcagctacagaaaattccacaaccatgtgggctggtgacccttagcaagctaaggtctatccctccatgtcccattgcttt

SEQ ID NO: 556 - DNA, 401 bp, Artificial sequence
  /note="Description of artificial sequence: rs2299967"
  misc_feature (396)..(396): n is a, c, g, or t
taaagtgctacccagaaaggccataaaactgtttccctggagattttcaaaacaggatattcatctctacaggatggtttaaagacaaagctgaggtggaaggcaacaataatagccctgataaactgcaggaaattaaatgtttagcaacaatgaagaatgagttttcctagaacggtggccaatctggagagaagacccgggatacaggtgagggtgggaaagagctagagaaaagcaaagacaaaaattctctatttcttaacatattaaagaacatgaaatttaagaatgatcaaaactagtaataacacagtatgaggaaaatgagatatgaaatagagtatactcatccgtcagcctgaatggttaaaaccattcatattttataaaganaattt

SEQ ID NO: 557 - DNA, 401 bp, Artificial sequence
  /note="Description of artificial sequence: rs3789817"
accacttaaagatgaaaaaaacatttttagctcatagactgtacaaaaccaaaacaggctgtaggccaaatttggcccctggtctgtagtgtgctgatcctggcttccatcctcctgctgttctgtgaagtgggaggggtggtaagggagtagaaatgggaagaccagccaaggcgcagagtagatgagatgaagaggacacacatgggagatttccttagagggagaatgggcaagaccaatgtggaagctgtgaagtagccttcagatttctcatgtgagtgcctgagtaggtcatgttgccattggctaaaatcagaaatgatggaacaggagcaagtttaaggggtggaccagatttatttatgcacctgccagatccacacactttccttgctttc

SEQ ID NO: 558 - DNA, 401 bp, Artificial sequence
  /note="Description of artificial sequence: rs4298422"
aatgaaggttccttcaagtatgatccctaaagatttcataatactctcacttgcacaatcatgtgcaagttcagttctgatttattcaagtaactaagaacaatccagccatggacactattacagttgtttgcgaacttgttattctgaatcttcacccaagaaaagcattgtgcatctctgaccttccacaatcacagatagaggtggcagtgtctcattctgtgataaagttgctatttttacttgtgtactcctccccaccttcatcctgatactcgtatttaaaaactatattattagtatatgggtctctggtatcctgctactctttgcaattttcactactctctgggagcctcgccatcaccaggtccaaacacaactcatccaaaaatgca

SEQ ID NO: 559 - DNA, 401 bp, Artificial sequence
  /note="Description of artificial sequence: rs2374261"
aactcatccaaaaatgcaacacaatcagaggccaaaccaataggcacacagatatcataactctcctgatgttctctggcctccctcgtgcttccttccattctaaccacgccaagttctttcctgccttgccatctttgtctctcacaacgctacagggcctctcctaggaggctcttctaacactgtgggaaccatatcgctgtgaacagcatttaggatgcagtcactgtcaattcgattttgcacagcagtgaacaagatcctagcttacaacagtttaatggttctcaaagggtggtctgtggacctctaaggggtttaccaaaatcttttcaggggtctcatgaggtcaaaacgatattcatagcaatattaagttatcatttgccttttccaca

SEQ ID NO: 560 - DNA, 401 bp, Artificial sequence; identical to SEQ ID NO: 91
  /note="Description of artificial sequence: rs301191"
  misc_feature (174)..(174): n is a, c, g, or t
  misc_feature (219)..(219): n is a, c, g, or t
  misc_feature (230)..(230): n is a, c, g, or t
  misc_feature (249)..(249): n is a, c, g, or t
  misc_feature (318)..(318): n is a, c, g, or t

SEQ ID NO: 561 - DNA, 401 bp, Artificial sequence; identical to SEQ ID NO: 92
  /note="Description of artificial sequence: rs301193"
  misc_feature (26)..(26): n is a, c, g, or t
  misc_feature (369)..(369): n is a, c, g, or t

SEQ ID NO: 562 - DNA, 401 bp, Artificial sequence
  /note="Description of artificial sequence: rs2062246"
acactctagcctgggagacagagcaagactccatctcaaaaaaaaaaaaaaaaaaaaaaaaaagttcatgtactttaagcaacacttctgcttctaggtatctattatttttaaatacaacttacttctacatttatgaaaatatttataattacaagatattctctggaacattgcttgtaatagcaaaccccctccccaaatgtactgtttagtggaggaaagattaaataatttgccatatatccatataatggcagaccagaaattcagatacacccatatgcaataacatggaaagatttccgaaacatatgtatcataaataaaactaaccaaaagcaatgtatttacgttgttaatttatattttatatcatttatattaatattttacattta

SEQ ID NO: 563 - DNA, 401 bp, Artificial sequence
  /note="Description of artificial sequence: rs4857681"
  misc_feature (343)..(343): n is a, c, g, or t
  misc_feature (378)..(378): n is a, c, g, or t
ttgtagggggacgtatgaaacagagtaatgcaggcacctcagacatatatcaccacactaatattcattcatttactccgcaaatgtttactgggtacctaatatgcatcaagaattatgtaaggtgctggggttatatagcaatgaataatcagacctaggccatgaccctgtatttgagtatctcagcgtctggtaggcaaagtgaccctgaatatgtaattacatgtgagcagtaaataaagtgtgttaaggaaatgcaagattttatatagcacctaccccaaaaggagctgggcactatatggcatatacattttaacatggtacagaattttgttcnttcagttagtagattgctttttcttgagaggaagncttcctagtgatttaaaatcttt

SEQ ID NO: 564 - DNA, 401 bp, Artificial sequence
  /note="Description of artificial sequence: rs4857686"
  misc_feature (24)..(24): n is a, c, g, or t
  misc_feature (166)..(166): n is a, c, g, or t
tgagtatctcagcgtctggtaggnaaagtgaccctgaatatgtaattacatgtgagcagtaaataaagtgtgttaaggaaatgcaagattttatatagcacctaccccaaaaggagctgggcactatatggcatatacattttaacatggtacagaattttgttcnttcagttagtagattgctttttcttgagaggaaggcttcctagtgatttaaaatctttatgtggatattaagtggtaactacttcgatgtgttcccaaacatgagaaaacagtaaataacttaggataggtttagtggttttggtttttatttactttaatccctagcacagaacttggggcaggctggtacacaaaaatatttattaaagacaaataaataagcaaaagagtct

SEQ ID NO: 565 - DNA, 401 bp, Artificial sequence
  /note="Description of artificial sequence: rs4857698"
  misc_feature (256)..(256): n is a, c, g, or t
tgcattcatttccttcttgctacagaatatcttatagtaatgttttagcaagaatctcttaattctaaagtttcaggtttgtatttctgagagtgtctcatttctttctcactcttgaatgatgcatagctagctaggataatttcctcctgaatacaggccaaaaagttaaaatttatgctggaaaaacatttttaaataattttggaagtcctcaaagtgataaaagaagaaaaaatatccacaaagtaagaanaaaatttattttttaaaaagcatacaaatacaaatataaatcaaaaccagataaagattgtttaaagtattgattattaattttggaaatgaaaatatctacattaaaattaaattatgagatgcatgccagtttaggcaaagac

SEQ ID NO: 566 - DNA, 401 bp, Artificial sequence
  /note="Description of artificial sequence: rs2200826"
  misc_feature (2)..(2): n is a, c, g, or t
  misc_feature (15)..(15): n is a, c, g, or t
  misc_feature (233)..(233): n is a, c, g, or t
tnataatgccactanactccagtctgggtgacacagagcaagactctgtctcaaaaaacataaataaataaatatcccattgtctgcatataccacagtttgttcatccattaatctactgacatcttagttgcttccaaattttggcaattatgaataaagctgttatgggcatccatgtgcagctttttatgtgaacacaagttttcaatttatatagataaataccaagnaacacaattgctggatcatatggtgagagtgtgtttagttttgtaagaaactgctaaactatttttcaaagcagctgtaccattttggattctcaccagcaatgaatgagcgttcctgttgctctacatccttgtcagtgtttggcattgtcagtgttctagattttg

SEQ ID NO: 567 - DNA, 401 bp, Artificial sequence
  /note="Description of artificial sequence: rs4894072"
aagaaaaaggtgacttaaaaatggtagaaaagctttgagatatttttacgtgcccttgctctacccctcctgggttcagcagaaactattagagtggataagaataataagactcaagtatacattgtctacaagaaacctactccaaatataaaggcagaggtgcattaaaagtaaataaattggagtaacaatgtgaactgatatgtcaattagctcaattaatttaacatgtgttaattattttgcaatgtatacatacctcaagacatcatattgtacaacttaggtgtatacaatttttagttgtcaattatacctcaataaagctggatgaaaaaaaaggtaaatggacagagaaagatgtaccatgctaacactagtctgaagaaagctgagta

SEQ ID NO: 568 - DNA, 401 bp, Artificial sequence
  /note="Description of artificial sequence: rs4241859"
  misc_feature (231)..(231): n is a, c, g, or t
  misc_feature (344)..(344): n is a, c, g, or t
  misc_feature (350)..(350): n is a, c, g, or t
cttaatataaatcttcagtctgagcactcacatctttctttaattctagaaaactctcatcaaatttatttagaagattgcatcttaaccattgtctcaattccctgctttgaacttcgaatagataatggctggagccttggcttctctcctccacttttcaaattctctttcatattttctatctcttttcctcactggtctctatattcagtcatttcctcttgtctntatctcagttaactaagtccactaatttactaagcccactaatactttattcaatttatataatgtgtaaaatatctgattttttaaaacacgaaattgtatttttaagaaantcttgntattattttatattttttcctttctctttgatatttcaaatctcttcagaa

SEQ ID NO: 569 - DNA, 401 bp, Artificial sequence
  /note="Description of artificial sequence: rs4241860"
  misc_feature (171)..(171): n is a, c, g, or t
  misc_feature (314)..(314): n is a, c, g, or t
  misc_feature (320)..(320): n is a, c, g, or t
catctttctttaattctagaaaactctcatcaaatttatttagaagattgcatcttaaccattgtctcaattccctgctttgaacttcgaatagataatggctggagccttggcttctctcctccacttttcaaattctctttcatattttctatctcttttcctcactgntctctatattcagtcatttcctcttgtctatatctcagttaactaagtccactaatttactaagcccactaatactttattcaatttatataatgtgtaaaatatctgattttttaaaacacgaaattgtatttttaagaaantcttgntattattttatattttttcctttctctttgatatttcaaatctcttcagaagttcacttttggaatataggcctcctgttt

SEQ ID NO: 570 - DNA, 401 bp, Artificial sequence
  /note="Description of artificial sequence: rs4241862"
  misc_feature (95)..(95): n is a, c, g, or t
  misc_feature (101)..(101): n is a, c, g, or t
ccactaatttactaagcccactaatactttattcaatttatataatgtgtaaaatatctgattttttaaaacacgaaattgtatttttaagaaantcttgntattattttatattttttcctttctctttgatatttcaaatctcttcagaagttcacttttggaatataggcctcctgtttttatgctgacgacctctcattaggaattctctcccatccatatcgtgtgaaattggactctatcattcttggcatgtgcttggaatcccagttctgtgtggatcctgttgtgtcttttgaacaatgcgcagtttttctagtttccacttcacagaggaagtacaagggttcaaacatttgcccttttaccaactctcagggtggttctgggcaaattac

SEQ ID NO: 571 - DNA, 401 bp, Artificial sequence
  /note="Description of artificial sequence: rs4273547"
  misc_feature (1)..(1): n is a, c, g, or t
  misc_feature (278)..(278): n is a, c, g, or t
  misc_feature (343)..(343): n is a, c, g, or t
ngtacaatacatagagatatttgggaaaaaagctgtctcactgttactttaatgcagtaacaaaagacactgtcatacaaagcaaagaggagtgtcaatattgtgcacgtatgtccagcttcttttttagaattctgcatttggtgttgcatataacggcaatgctattaggaaggaagctttttccaaactgtttctggatctgtctcacagtttgaattctcacagtttaaggcatgtacttgtcagtaatgaacatagcacaatgttgatctacngcactgcagtgcagaagcagccagtcataattactttgatttctataaagatggacctttttctntgagtgtgtcggctgaaatggagatgccctgggaaaaatttaagatgaaggccttgtc

SEQ ID NO: 572 - DNA, 401 bp, Artificial sequence
  /note="Description of artificial sequence: rs4282263"
  misc_feature (16)..(16): n is a, c, g, or t
  misc_feature (249)..(249): n is a, c, g, or t
  misc_feature (292)..(292): n is a, c, g, or t
  misc_feature (297)..(297): n is a, c, g, or t
caggacagaggatccnagctcagaagcccacctggtggcatagaagtccccccacaggacagagggcctctaatagtctagactggaccttttgaaccaatgctgggagggctttgctgactacattattgcagttagaaaagagtttctgtaattgaccaaagttatcaggtttcatacctacttttacttatgttgacagctcacaattgtgacacaaggcaacttccaggactctgcagtgctatnaagtggcaagagaaaaatgcaaagctcaatgcggccaccaacngcaantgagccacagtttttggattaaaagtgtattttaatgtgctgcattctgcccatgttatctatgaattctattttctattaatgagaattgatatcaaggtcat

SEQ ID NO: 573 - DNA, 401 bp, Artificial sequence
  /note="Description of artificial sequence: rs4846999"
  misc_feature (395)..(395): n is a, c, g, or t
catgtcaaagccactgttacccgttcctgttaccatgcagtgcagtcagattgccagtccccttgtcggaaagaagcttgtggaccggggccttggagctcattaagtgtgtgttgaataaatctccaagcccacgtactttcctagggactcgggtcggaaagaaaaagaacttaatctgaagttttgcttaacattcaactaaagcttccagaatgggatatttagaagcttagaacattcttaccgactattgcagtacgacaaagcaaaccattactctttaaagaagttgctctactttttacgtgatgcatttgaagaagttggtagttgtaggtcataaacttagagaaaagaaatataaactgaaaacacttcactgatgataaagntcatca

SEQ ID NO: 574 - DNA, 401 bp, Artificial sequence
  /note="Description of artificial sequence: rs1887492"
aatatgcaattgctggcattccagccaccaccccagtttgcactctaagttctattttagaacttgtatttctgtgatttcacttcctgaagctgcatttaccaaaggcattctgtcaactcagagtgggaaaggtggtggggctagtgagtcagagaagatgctggtgttgagccttaagaagtcaagagatggacaaactgagattattctgtactctgagattcttgacgtcaacaaggcccctgatctccgtgtatggcctttcctcttccagggcacctctccccagcatgtacccttagctgtttctttctaccctcatttcagggtagctcttagccagtaggcaaaacgaagggtttctggatcaatgagttgattctgtacattctttgaga

SEQ ID NO: 575 - DNA, 401 bp, Artificial sequence
  /note="Description of artificial sequence: rs3736983"
  misc_feature (152)..(152): n is a, c, g, or t
ttgagggctttgtccatgccaacctaaaggcagaaatcatgttggcacacacacctcacaatcaagagtaacagctaagtatccatttaatgatcaatgtagtgctagacttaggttattctttctgtacaacaaaatgaacaaccatatantgttaagtaactaaataacaaatgttattttataataaatattgctgacagaatgtgaaaaaacctttgatgtacatgaaaactataaaaataagagaagtcataataaataaaagcctccttaggcacaatttgcctctgaataaaatattttaatgaatttgagaaattttaactggagataaagagctatctgtctgtaatttacaatattcaaccagttgatgtgaaagtctcaaggagtatatc

SEQ ID NO: 576 - DNA, 401 bp, Artificial sequence
  /note="Description of artificial sequence: rs1996805"
  misc_feature (179)..(179): n is a, c, g, or t
  misc_feature (240)..(240): n is a, c, g, or t
tcactcttcctgaacctcattacttttggcagtgcctctactggtaagtgaaatgagttggatagcacaggagcagatatatgtttttaagaataaactcagggaccttgagtatcacaaaatcttagttaatccacctcttttcctttagaactctgcttcagcctcacccctctganagacctggtgccagctctgcccgcctccactggctccatttatcaatgctggcccctgcanccctgatcctctcactaatcctaagcttagagtggcttttcctctcccatggggccaattcctattgaacttcagttagtccaggtggagtggggctctcggtctaggatacaagcaagctcatgcccttggtctgactaacactatattttaaaattgga

SEQ ID NO: 577 - DNA, 401 bp, Artificial sequence; identical to SEQ ID NO: 78
  /note="Description of artificial sequence: rs6793017"
  misc_feature (30)..(30): n is a, c, g, or t

SEQ ID NO: 578 - DNA, 401 bp, Artificial sequence
  /note="Description of artificial sequence: rs6763008"
gtatttttagtaaagatggggtttcgccatgttggccagtctggtctcaaactcctgacctcaggtgatctgcctacctcggccttccaaatactggaattgcaggcgtgagccatcatgcctggccatgagataatttttaatgaatttaatggaatgattcaagaagaaatattcagtaaacatttagaaagttgggaactgggattccagagaggctcaactggaaaaacacttaatagtcaaatgcctagggaaggtagcttcattcaccagaatgaaaccaaaaattgtgaacctcctttagaagttttacatctagagaaccatgaaacaaagtgaattttcatttatctttaagtccaaagagaacttaataaccctcatgtttctcatgatac

SEQ ID NO: 579 - DNA, 401 bp, Artificial sequence
  /note="Description of artificial sequence: rs6774320"
  misc_feature (269)..(269): n is a, c, g, or t
atagtcaaatgcctagggaaggtagcttcattcaccagaatgaaaccaaaaattgtgaacctcctttagaagttttacatctagagaaccatgaaacaaagtgaattttcatttatctttaagtccaaagagaacttaataaccctcatgtttctcatgatactgtccaaaatccacagatccccaggaaattatttcttcttttcacagagacatgcgtattaaagctaactgaagaaggcaaaaaggaaaacaaaatgactgtgaanagactaggtgtatctgttctgttcatatcctttgcccactttttgatgaggttgtttgttttattcttgtaaatttgtttaagttcctggtagattctggatattatccctttctcagatagattattagcc

SEQ ID NO: 580 - DNA, 401 bp, Artificial sequence
  /note="Description of artificial sequence: rs7774098"
taattgcggtccaggaccatgagcatcagcattatctgggagcttttcagaaatgcagaatctcaggcctcactccacacctgctgagtcggaatctgcattttaagagcaccaccagcttattcatatggagattgaagcttgagaagtactgatttatgttatccaatgttattattgataggattattattgggggaagaaatggaaagcttttcccaaattatagcaataggtatcaatttctatgtccaccaatatgtcccagaagagttgctagttttatgagacaaatttgttagaaagtaaagatactataatttcaatggaaatgcatgtcaattcaacatttactgagtacctagtgtagactgagctatttgttgtgagagatgcagata

SEQ ID NO: 581 - DNA, 401 bp, Artificial sequence
  /note="Description of artificial sequence: rs7074522"
ggcgggctgaagggctcctcaagtgcagccagtgtgggcgccaaggccaaggaggcaccgagagtgagcgaggactgcaagggctgccagcacactgtcacctctcagtgggagatgatgacaaccattttgcagacctttttgaggtgggcatggatgatttccagcttctgaagaaggagctggtgacaggtatatatcagtgcatctttagctatttgaggaacaagaaaacacacagcatggagtctggaggatgagggctattgacaggatgaccaggaatccatgggcttcctccagcagtgtggagatcagagctcccagagcctaggaatgaggcatccctatgggaggggtgttcagtgaggagggagggcacacagccagaagaaatgatt

SEQ ID NO: 582 - DNA, 401 bp, Artificial sequence
  /note="Description of artificial sequence: rs7808325"
  misc_feature (213)..(213): n is a, c, g, or t
  misc_feature (342)..(342): n is a, c, g, or t
  misc_feature (344)..(344): n is a, c, g, or t
gatctcctgacctcatgatccgcctgcctcagcctcctaaagtgctgggattacaggcgtgagccactgcgcccggccagatctagaaacttctaacttgaatcccacacccccaagtgcaaatgagacccatgaccatcacaaagaccccccagcgtcgtggtcaaggctaccaggaactggcagcagcgctctgcccacgtccacaggaantggccgacgtctcctctgcctttggtttagtggccccacacttcatcacctcactttgtccatgaatttcacacgttttcttacaagagctctgtaatgcgccaggcacggtggctcacacctgttatncnagcactttgggaggccgaggcaggagaatcacttgaggtcaggagttcaaggccagc

SEQ ID NO: 583 - DNA, 401 bp, Artificial sequence
  /note="Description of artificial sequence: rs7806101"
gaacctgggaggcggaggttgcagtgagccgagattgcgccactgcactccagcctgggcaacaagagcaaaactccgtctcaaaaaaaagacaaaaaaaaaatccagaaacttctgcccagagtctcagtgggtgcaaggcagggagttacccacgacaaagaacctcaccgtttgccaacactaagtcaagtcccccccgccacagcggccacttaaagggaagaggacgacggggtccagcctctcgctgtgaccctgcctgaggtggtgctggactcacgacacacagagtcaatagcagaaaggcactcacaaaagcagaggtttcggcaataaagacgccatcacacacctctttccacacagtaatctcgtgggcagcaatgtccatgaccgtg

SEQ ID NO: 584 - DNA, 401 bp, Artificial sequence
  /note="Description of artificial sequence: rs7799970"
  misc_feature (76)..(76): n is a, c, g, or t
cacagagggactggcacagagggatgggcacggcttctgccgaggaagtcctgaggctgctctccaacaccacgcngcaagcatgggtgatcaagggctctcccaggcacctgcgtgtaaccagcgccctctggggccacctgcgagctcagcgccgggctcagcttgtgcctgaggacacaaaacaccaaagagctgtgcagcaccagccttcaaaaaacgcaccgtccaaccggggaacgcaaagagcttactgcatccaccttagatcatcagacttgcctaaaaaccacgaaggtgcaggtcaccccaggaggccagagggcaagctcccggcctgcaaggggcggcatggagccggccacaggcagcaggtgaatggaggagagcagctcagagca

SEQ ID NO: 585 - DNA, 401 bp, Artificial sequence; identical to SEQ ID NO: 89
  /note="Description of artificial sequence: rs635546"
  misc_feature (317)..(317): n is a, c, g, or t

SEQ ID NO: 586 - DNA, 401 bp, Artificial sequence
  /note="Description of artificial sequence: rs6117052"
atctttggccttagaaagaactttagaagttgtctggtcccatccctccttgtcgattttaggagaaaactgagccccagagagagaaattggcttgtctgaggtcacacagtgttgagttcctaattacccagtgaaaagcaaaggcgatctaattctcactgtttcactctggctctgggtttatttgcacagctaacaaggtctcacctgccctgatattagcaatgtgagtctttccctgaaggtatggctaagtaaacacacctggcaagcatcaagccacagagcggtttcaggggctctgactccagctgttcccatttacccccagaactccaggaataattactcccaatacagactgccccagagacccagaattggtatcttctaagtga

SEQ ID NO: 587 - DNA, 401 bp, Artificial sequence
  /note="Description of artificial sequence: rs6076925"
  misc_feature (51)..(51): n is a, c, g, or t
  misc_feature (250)..(250): n is a, c, g, or t
  misc_feature (312)..(312): n is a, c, g, or t
gatggtggttgctccatcagcctggatccctaggaagacccgagctccccnagggctgatcacattgcatagatagtatgagagataaaactttgtggtttttgggtgcttgttaccacagcataacctgtttatttggactgacacaggccttgattacagtgtcacgttcataggttcatttattcattcactcatcacgttgaatgctgctctgtgctagatactgttctaaatgccagagcaggcntagtccctcctctcaaggagctctcattctgttggggaacacagacaatatgcaaataaatnaacacggtcattatggatttttaaatttttatttatttaaaattttttaatttctgtgggtgcatagtaggtaattatagattgcaatt

SEQ ID NO: 588 - DNA, 401 bp, Artificial sequence; identical to SEQ ID NO: 69
  /note="Description of artificial sequence: rs9302822"
  misc_feature (145)..(145): n is a, c, g, or t
  misc_feature (289)..(289): n is a, c, g, or t
  misc_feature (347)..(347): n is a, c, g, or t

SEQ ID NO: 589 - DNA, 401 bp, Artificial sequence
  /note="Description of artificial sequence: rs8050684"
  misc_feature (248)..(248): n is a, c, g, or t
  misc_feature (341)..(341): n is a, c, g, or t
cttgtctttgtcagacacattgcttatgccagtcttctactcaaacaaccttcagaagttcccagttgagcattacgtaaaaccaaacatatgagcctgagatttagagtcctcccattttggtcctggacatatttttcttagaatctaagacataactaatatgctgtctacccactttgggtcatacccaaatggccagttacattgttcccatgtcttcccttgagagcagacatttatgaacntctgtttaaatagaataatttttttctaaagaagcctttttatggatcaaaatccttccattattctctgtgcttacagagtcttaagtctanataatctctttaatctgcctgccttctcttattccatttctcaaaaccctcccctgcttt

SEQ ID NO: 590 - DNA, 401 bp, Artificial sequence
  /note="Description of artificial sequence: rs7798471"
gtagagaataaatacatgaacagaaacactcaccagggatttattcattttctgctgctcttggaaaaatctggaggactgtgaaagcggaggcagatctggggaaggaaaacccaagccatggcgttatgagcggtctggcctgccaaggcggtcatctcccgcccaaaacctacacagaaagttccaagaagtacatcctgtgggagactgtccctttaagccttcagaagggattggaaaatgatcaggagggggaccgatctgcacatttgaaactcacacatggctaccttgtgactgagtggatgagattctcatggtgaatgaatactggatcctactgaaataatctgccatcattaaatgcaagatttaaaaaggaattctggtgaccagcc

SEQ ID NO: 591 - DNA, 401 bp, Artificial sequence
  /note="Description of artificial sequence: rs968026"
  misc_feature (1)..(1): n is a, c, g, or t
  misc_feature (30)..(30): n is a, c, g, or t
  misc_feature (223)..(223): n is a, c, g, or t
nctatgggcacatagccaaacttaagagangtgtattttatatcttgtaccgattaaaccctttatcttgtttcgaaggtgtcttagcaataataatataagattttagcatatgcaattgtcttagcaataataatataagattttaggatatgcaattgtctttgaggacataaatttagtttctaattggaggaaatcggaaaactgcgagcacaatcanagtaaaaataagtctaccttgctaatgagttttccccagctcatggttagtaatcagtaggtctttgctgactgatgtactaatttacaatctagttagggacatcaggttgacacttgaaaaacatattaactataaaaggaagaaaataaataccatagaagaaacagaatttggc

SEQ ID NO: 592 - DNA, 401 bp, Artificial sequence
  /note="Description of artificial sequence: rs7645289"
  misc_feature (342)..(342): n is a, c, g, or t
aagtcacttgctttttgtttttttttcagtctccagattgaataggcagactgcccaaatctccctttctttcattttttcactctctctgtcagaagaagggggcattataggacagtattattaggctagatctttgccttgttttagtgtcttatccactggccccttcatagggttgggaaatggtttcataagatagtagaaagggtggcataggtacttgcagtatggctaacagttgttcaccatgtagctttagatatcttagacccagttcccagctgtgtctgccttagtcactctggtcctcgtcttcctcagtatctcctctatgaggtnggcatccatgcaattcactccaattgcttgtacattcttacattaagttttgggggatc

SEQ ID NO: 593 - DNA, 401 bp, Artificial sequence
  /note="Description of artificial sequence: rs7627583"
gaccacatgcccctggcaactgctaatccaaggaacataaaagacacgtggattagatctgaacctaccctggagactggagcctggactccaacctcgcttagccaagtggcagctagcatgctgctgatgaatgtgagaataaatgattgtttcttcaagttcatgaattttagggtggtttgttagtttgttattaaacattgttgcagcaacaactgactaatacaggtcatctacagatattttttttctaactctatgcagacatatgtaagtatgaaaatttcctcaaatattccttttcttagatgtctccaacataatttgcaatgttacctgggcgtttagtggttttaactaagaatgtcttttctctgcattggaagaactgaattggt

SEQ ID NO: 594 - DNA, 401 bp, Artificial sequence
  /note="Description of artificial sequence: rs9859212"
  misc_feature (221)..(221): n is a, c, g, or t
gcatattgcatgatgctgaggtttggggtacaagtgaatctgtcacccgagtactgagcatagtagccaatagttagtttttcagcttttgtcctcatctctccctattccctctagtagtccctagtgtctattgttgccatctttatgtccatgagtacccattgtttagctcccacttacttataaatgagaacatgcggtacattaatataggaacntacaaaaagcatgacaaagctcagaaagtaagttacaaatacatacatgttcctgtattaattcacttaagataatagcatccagttgcatttgtgttgctacaaaggacatgattgcattctttcttatggttgcataacatgtatcacattttaaaatctaccattgatgggcatctg

SEQ ID NO: 595 - DNA, 401 bp, Artificial sequence
  /note="Description of artificial sequence: rs6790525"
  misc_feature (283)..(283): n is a, c, g, or t
tgaagttagttggttgctttgtagtttctattgtgtggttgctttatagggtctgtgaagtgtgcacttaagtgtgtttttgtggtagcaggtatcattctttcatttccatgtttagaactctcttgaggatctcctatatggttgatctagtggtagtgaatcccttagtgatcacttacctggatataattttacttctccttcacttttgaagtgtagtttggtgagatatgaaattcttcattggaatttcttttctttaagaatgctgaaaataagnccccagtctctcctggcttgtaagatttctgctgagaagtctgttagtccaatggggttccctttgtattgtacaatttttatcttttatgccttagatcaaagatacgctaggtagt

SEQ ID NO: 596 - DNA, 401 bp, Artificial sequence
  /note="Description of artificial sequence: rs9861146"
  misc_feature (66)..(66): n is a, c, g, or t
  misc_feature (233)..(233): n is a, c, g, or t
ttagtaatcattatttaggtaactaattattcctaggagtgatcttaaattgtgttttaaattttntatcacttcagttgtagcaattaaggataaatgattatcttaaataattatttaataaatagttggttttaaggttaagagtaataaggtgcttaagagtgagatacatcttctgtgatttagtgaaccacattataggatgcatgactcctgaaaccatgaagctntggcttgagcagttgggagcagtttacctggattgaaaaagaaattagtgcctagaaggaaggattttgtttagtgtgttaaccttactatatcttctcaaggtgatggtaaaccttgaggtatttgcctagctattgagcatcaaaacaattcttattttctcttaa

SEQ ID NO: 597 - DNA, 401 bp, Artificial sequence
  /note="Description of artificial sequence: rs6047077"
  misc_feature (254)..(254): n is a, c, g, or t
  misc_feature (257)..(257): n is a, c, g, or t
  misc_feature (306)..(306): n is a, c, g, or t
  misc_feature (334)..(334): n is a, c, g, or t
  misc_feature (348)..(348): n is a, c, g, or t
taaggaattggcttaacatcttcagggtaggtcaccaagctggagacccagggaagagtcaaagactgtctgctggctgaatccttcctggttggagaaccagtctttttttcttaagtcctttaactgattggataaagcccacccacattttggagggtaatctttgttactcaaaggccactgatctaaatgttaatcgagtttaaaaacactttcacagaaatgtctagaatagtgtttaaccaaatacntangtaccacggcccagccaaattgacacataaaatcaaccatcacaactcntaacttttctcttgaaaacatttcctgnatgcacagatagancttgggatgggcagaccctttccatattctctcacttgcaggcaagaaatgtt

SEQ ID NO: 598 - DNA, 401 bp, Artificial sequence
  /note="Description of artificial sequence: rs6035711"
  misc_feature (61)..(61): n is a, c, g, or t
  misc_feature (184)..(184): n is a, c, g, or t
taaaagaaagcagcactgttagccgggcgtggtggcatgtgcctgtagtcccagctacttnggaggctgaggcaggagaatggcgtgaacccgggaggcggagcttgcagtgagccgagatcgcgccactgcactccagcctgggtgacagagcgagactccgtctcaaaacaaaaacaaaaanaaacaaaaacaaaaacctaccactgttgacgaaaatgtatcgcaataaatgaaaaaccatggctgatgctgctacaagtgtaagaagcgataaaagagagtccttctgctggaggagcttatgctgcagctggggagggaaacatcggctcattggaaagagccatgtaactaggtcaggagtatgtgggtcttcaccccagttgcaggttgttatc

SEQ ID NO: 599 - DNA, 401 bp, Artificial sequence
  /note="Description of artificial sequence: rs6035712"
  misc_feature (392)..(392): n is a, c, g, or t
tgcccggcctgttcatctgttttcacacaactaaagttgctcagttgttgtgctggaaaggacttccctgcccaaaatataccagcaagaccatcatgcaaccggagcaggctgtgccacagaccctggcatgcagaggtgttgtgtaaacacagaagggatctgggcaaatgcatgccttcatttataacagataaaaagaaagaagtgtgccagacagtgaggcactgacgcttcacaggagggttccgagagctttcctccctgcctgaagttccttctcaacccaagtagccaccttgtcctcgtgtttgtagttcccctctcaatccaagcactatccttggcctgggggggtcatcatcaccaccagcaagggtcagcactgcagngtgacaatc

SEQ ID NO: 600 - DNA, 401 bp, Artificial sequence
  /note="Description of artificial sequence: rs7307064"
  misc_feature (92)..(92): n is a, c, g, or t
  misc_feature (98)..(98): n is a, c, g, or t
  misc_feature (106)..(106): n is a, c, g, or t
  misc_feature (360)..(360): n is a, c, g, or t
ttgagaagaaaaagagcagttcttttgggggaatttagttttggtcatgctaatttagatacacatttctgataaacaattaggagtataantttaangtttagcngttagctaattagatatgggaataatgttttacactttggcagcagatccacagagacaacataagtcatggtaatacttaagcaagggtgataatcataagggatcaaaccatttaggttgaaaatagggcaagagtcacaaatcaggtaacttcagtggccaccaggtaacaactatgtggcgctatctggttaagaaaagaggggcccttaatagaaaggcgtatacatcccgtttaaggcatttaaatcnatttaaaatatataaataaataaaaacaatgcccataataa

SEQ ID NO: 601 - DNA, 401 bp, Artificial sequence
  /note="Description of artificial sequence: rs7307519"
  misc_feature (195)..(195): n is a, c, g, or t
  misc_feature (209)..(209): n is a, c, g, or t
  misc_feature (304)..(304): n is a, c, g, or t
gcagttagctaattagatatgggaataatgttttacactttggcagcagatccacagagacaacataagtcatggtaatacttaagcaagggtgataatcataagggatcaaaccatttaggttgaaaatagggcaagagtcacaaatcaggtaacttcagtggccaccaggtaacaactatgtggcgctatctngttaacaaaagagnggcccttaatagaaaggcgtatacatcccgtttaaggcatttaaatctatttaaaatatataaataaataaaaacaatgcccataataattctgnaggtagagaatgcagtcttcgggctacaagctcactatccctggagaaacgtaagaaagggtaaagactgaggtcagaaccctagggaacactaata

SEQ ID NO: 602 - DNA, 401 bp, Artificial sequence
  /note="Description of artificial sequence: rs7976409"
  misc_feature (181)..(181): n is a, c, g, or t
aaagctgaatggagttatgcaatttttgtttttttgacaatgtttagtagccaagcagcaggaatggggaaagccaaagtctagatgaatccagcatctcaggcacaacgcctgaagcagactggcagaatggccaggcagtccagggcaaatataacagaagtaaggggcaacagcacantgtctggacgggaaacagaatgattgctatgtagggacaggagcctggataaataagcagggattaaaagagggatccagcaaatcctaatgtgtgaaaagcttcagaaggaaaacaggttgaagccagggagtcggatttttgaatttaagatttttttgcatataacaattctgagtaacttactttaggctatgactgtaggattaggtggtggggt

SEQ ID NO: 603 - DNA, 401 bp, Artificial sequence
  /note="Description of artificial sequence: rs7976415"
  misc_feature (221)..(221): n is a, c, g, or t
aatttttgtttttttgacaatgtttagtagccaagcagcaggaatggggaaagccaaagtctagatgaatccagcatctcaggcacaacgcctgaagcagactggcagaatggccaggcagtccagggcaaatataacagaagtaaggggcaacagcacagtgtctggacgggaaacagagtgattgctatgtagggacaagagcctggataaataagcanggattaaaagagggatccagcaaatcctaatgtgtgaaaagcttcagaaggaaaacaggttgaagccagggagtcggatttttgaatttaagatttttttgcatataacaattctgagtaacttactttaggctatgactgtaggattaggtggtggggtgaagaaaaaggtcactaaaa

SEQ ID NO: 604 - DNA, 401 bp, Artificial sequence
  /note="Description of artificial sequence: rs7956315"
gaaagaaaaccttaaaaatcttgttgaccacctttggagaatgctagaaaaccaactctttctgaaaactcataaagaaagggaaaaaaaaatcaagcattttcatcatgcagagttaatgaggaaaaagtttatttttgtagaaaaagtataactaatacatgaagaaagagtgacagaattagatatcaccattttgcacctccctaatgaaatcatggctctcacggtgccactcagtggctgctaaaaccattagatgaaaaactgataaccagagatcaggcagacatcacttgaacccactgacgcttagcatcacaaaaagataaccaggtactatgtaccacttgagtgataccacagtaagtatactcttgcaaaaaaaaaaaaaaaagtta

SEQ ID NO: 605 - DNA, 401 bp, Artificial sequence
  /note="Description of artificial sequence: rs7310464"
  misc_feature (41)..(41): n is a, c, g, or t
caatctcctaaatcatttaagtaaagtatcagactttgaancaaaaggaagctaattccctaattactttgctattactttatgaaggtattcctatttgggctcacttggtggtaaaaggagttggtaattataaacaagaggatgtaacaagtaagagaaatcaagtgtactattggaattggcattttatctcctttataactaatctataaagaaaccccagtgtatgattctaatcaatctaagtattaaagtcaaaaagtgagatgctttttgataccacatcgatggaagctagaaaaatcttaaagatgttcttggtgcattctcatatacctgcctgcattaatcagtatacaggtttaatgtgcttcttcatgagatataatttatggctg

SEQ ID NO: 606 - DNA, 401 bp, Artificial sequence; identical to SEQ ID NO: 64
  /note="Description of artificial sequence: rs7788668"

SEQ ID NO: 607 - DNA, 401 bp, Artificial sequence
  /note="Description of artificial sequence: rs9647996"
ttttattcctgtgcaatttgcgccttgtgtttgcagaaactgagaatgttttccttattcggatgaatagcctagtgttggcagcctatgtgtgcctgcagaggaaatcttcatccctctttttccttgcctaggagataccagagatctgagcaagtggaattttgaggctgaagtaagataatgagaagacccagagaaattataaaagatgcagagtgagagaatggaaagagccttgaaccagaagtcaggcttgagctgaaagctcacatcgctcttgtaagatgtgtgttctcagttttcttatctgtaaaatgaagggactgaactctgatctgaaagtaaaatgttctgttcattgagcatagggggcttgttcaaagttgttacccgttgtt

SEQ ID NO: 608 - DNA, 401 bp, Artificial sequence; identical to SEQ ID NO: 57
  /note="Description of artificial sequence: rs7350731"
  misc_feature (109)..(109): n is a, c, g, or t

SEQ ID NO: 609 - DNA, 401 bp, Artificial sequence
  /note="Description of artificial sequence: rs8037818"
aagccagagttctcatgttgacctgcaaaggcctcacgtgatctgttctcaggctgcatttctgagctctcctccagtcccccttgctcactctgctccagtctcagagactgcactggcattctgctctttctgtagtgttcttcccccttaaatcttcatggctctcacctttgttttgttttactcacaaattatctcctcatcaccctattttaaactaaacctccattcttcaccactccatatcctttttactctgttttacttttctccgtagcacttttcaccttgtatattgtatttatgcaatataatttactgtttatcttaagtctaaatttccccatctaaatagaatgtaaattacataaggataagattttggtctaggtacccca

SEQ ID NO: 610 - DNA, 401 bp, Artificial sequence
  /note="Description of artificial sequence: rs585972"
tttaattcagtttgttctatatacatttattgagtgcccatgctctgccaggaacagttctaggcacagaggagaccatgttgaacatgactgaggtgcccacactcatggaacttacagcctaacagaaataacaggtataatgagtgatacaacagacaggttgctatgggagtatataccagggtaccaaacctgggatcagggaaggcttccctaaagcagcagatgatttctctgagatcagaagttagtgttagatggggcctagggctgcctggacacggaggggacccttccaggcagaaggaacaacatgacaaggacctaaggaaggaggaatcagaaagaaagccaagaactggggttagagggtattaaacaggatctggatagaaagg

SEQ ID NO: 611 - DNA, 401 bp, Artificial sequence
  /note="Description of artificial sequence: rs604518"
  misc_feature (387)..(387): n is a, c, g, or t
tgatctctcctaagagaattgactataaaatgtgcttctagatgccagaaagagcataggagagggataataactttgtgttttaagcaacatttaagactccagaagtaatgagatttgctaatgaaactgaaaacacaacaagcttctctgggtcttattaatttctgcctaagtatttaattatcccactttgttgacggtacttcttctgttatttttaactctcccatcttaattttcataagaaatatccgagctgaaaactttacagtgtccttataaattaagagctgtggtttgaccttaaagttagggctagaaaaaggtcagcgggagggcaatacctcattttcattcctctaggatgaatagtctttgacatangaataatgtttcag

SEQ ID NO: 612 - DNA, 401 bp, Artificial sequence
  /note="Description of artificial sequence: rs685428"
catgcccagctaatttttgtatttttagtagagacagggtttcaccgtgttggccaggctggtcttgaactcctgacctcaagtgatccacctacctctgcctcccaaagtgttcggattataggcctgagccaccaggcctggcccagagcaccactttacaaacattatggggaatgttataaagaagtttgtaccaactatctcaaagaaagttttttttttaatttttaaattgtcagataaaattgaatatatcatgtataacatgatgttttcaagtatgcatacattgtgaaatggctacatctagataattaacatgtgcattacctcacatagttatcatttttgtggtaggaacactttatatcctctttcttagcaattttcaagaatac

SEQ ID NO: 613 - DNA, 401 bp, Artificial sequence
  /note="Description of artificial sequence: rs624732"
  misc_feature (181)..(181): n is a, c, g, or t
  misc_feature (187)..(187): n is a, c, g, or t
  misc_feature (208)..(208): n is a, c, g, or t
tttttcctcagtaatttcttctatacttaaatattaatacttggatgtccactttgtgcaaaaggagaaagcaaggacccagaaatgatgtgattgcttccgagctctcccaatgttgggggtgggggaatctgagcaccccatgaagcccaccttggctcttctgcttcccaaggaagcntagtcngagagtcacctggactgagantgacacttaggggatttcctggcaatatcctggggaatggcagctccctaatgggaggaatctaaatccagtgcagtggacaaatcctaccaagacacagaacttaaaatgagatactgacgtttaggccccaacattattgcccatgcccctggaaattgcttcaccctgatgaatttatttatgaatgtgg

SEQ ID NO: 614 - DNA, 401 bp, Artificial sequence
  /note="Description of artificial sequence: rs584762"
  misc_feature (199)..(199): n is a, c, g, or t
gatgttattgaaaaagattgggaagattatgggtagtaatagagataattgcaaaggagaaacaagaaaaaaaattaatgaatcttccatctcagggagaaataaatggctttattatggggtcaggagggatgatcctaaaattccctgtccaagagaaaatgcatagtggtagtttgggagttggagaatttggcancaacaacatccatgaatcaaaacagcttttaagggacaacctcaggggattgcatttctataaaaggaatgagatgtttttctttatgctgctgaaaatgcagaatcagagccgactagaagcacagctagctcctttgtcattatatgcaaaggacaagaagaaacatgatgttccactataatagggccataggcaaaaa

SEQ ID NO: 615 - DNA, 401 bp, Artificial sequence; identical to SEQ ID NO: 39
  /note="Description of artificial sequence: rs761453"
  misc_feature (79)..(79): n is a, c, g, or t

SEQ ID NO: 616 - DNA, 401 bp, Artificial sequence
  /note="Description of artificial sequence: rs594462"
  misc_feature (283)..(283): n is a, c, g, or t
  misc_feature (369)..(369): n is a, c, g, or t
gtaacagtttatgtgcatgtattagtccattttcacactgctataaagaactacttgtgactgggtaatttatgaaggaaagaggtttaattgactcacagttctgcatggctggggaggcctcaggaaacttacaatcatagtggaaggagaaggggaagcaaggcatgttctacatggcggcaggagataaagagcacacagcagaaactgctgcttataaacaatcagatctcatgagaactctctcactagcatgagaacagcatgggggaaccgatgntgttcatgaccctatcacctcccaccaatttcctccctgtacgtatggggattacaatttgagatgagatttgggtggggacaccnagccaaaccatcagtgcaagcaggcagggctg

SEQ ID NO: 617 - DNA, 401 bp, Artificial sequence
  /note="Description of artificial sequence: rs687947"
  misc_feature (378)..(378): n is a, c, g, or t
tgtgtgtggtatttacaggccatccagagtaaagctttgtaactttccaaatgtctgcatttcactgagtgtcccatcaaatatttccaagtattcatttccaaggcgctgttcctagactgctaaacaccaccatcaacagcatctctgtagcagttaagaatcttcctgagttaattcactgaagtatttcccaggagccccgcatattgaagggctccacttatagaccagagtttttttttcagtgtggcccaagggctgccatcagaatgacgtggaatacttttcaaatgctgattctctgggtcaggccagaattgtcaaattcacatcccaaaggagagagctaagtaatctgcattttaacaaactccntgggtcagtctcattcacactga

SEQ ID NO: 618 - DNA, 401 bp, Artificial sequence
  /note="Description of artificial sequence: rs677874"
  misc_feature (67)..(67): n is a, c, g, or t
catttagtcctgacaacaaaggtaggtatttctgttctcattttatagagcagggaaatggaaactnatgacactgtgcagctaggaagtgacagaggatttctaaccatttctgtctgcttctaaagcccatgctctttatactggaggaagggggaaaaatggagataattggaggctgcaagctttcatctcagaccaaacagtcagatttaagaagctgtgcctcagtgggaccaatcttatggcttagaaactaattattgtcagagggtggaggttatatagacacaccaagtactgcctgaaaattgaattagtcaaagtacatcactgttgtttattatagcaaaaaataaaaagaaagaaatagcctaaatgtcaagcaactgggaatttta

SEQ ID NO: 619 - DNA, 401 bp, Artificial sequence
  /note="Description of artificial sequence: rs8095186"
  misc_feature (21)..(21): n is a, c, g, or t
  misc_feature (281)..(281): n is a, c, g, or t
  misc_feature (384)..(384): n is a, c, g, or t
acttaatactgggggcaaganggttcttggctgggcacacaatgctatgggaacttaaaaacaaatggactagctgcaggtttaaataatgctacagtccttagacactgtatattattcatagctcgttgaactctattatctcatgtgttcctctcagtggctctgtgaattacccaggacaggaaagaaatgatagaatgtgaagatagaagagtcagtagaggtcagaacccttccccagcccctcagctttttttttttttttttttttttttganatgaagtctggctatgtcactctgaagtgtcgtggtgcgatctgggctcactgcaacctccgccccctgggttacagcgattctcctgcctcagcctcccgantagctgggactacaggt

SEQ ID NO: 620 - DNA, 401 bp, Artificial sequence
  /note="Description of artificial sequence: rs816750"
ttacacaaaacagcacgttaaagaaaaattttgtttcagcttgtccatagtgtttcatgcctgggacattctttcaaatgatacttggttcctcttctcattctgaccttttataatctgcttctgccttaatcttgtcctgctgtattcattccaatgacaatctcagacaattatcaggtatcagacatcaactttgtctgggaaacctcccacatctattttagtggctttagtcactttcctctggactaaattctaccatttctaaggtttgactcctatgcattccaatgcagatgttctaagagcacctgaggaagaaatcttcaatcagagtttctaattttggacaaccatggtaacagctactttaaaagaagaaaatagaggctaatgaa

SEQ ID NO: 621 - DNA, 401 bp, Artificial sequence
  /note="Description of artificial sequence: rs583338"
  misc_feature (161)..(161): n is a, c, g, or t
tactttcctatcatcatctacctttgggatattatgtctttcttagtaaagtgtcgctacaagacttttgtccattttttattgaaatgtctgtcttttaaacattgatttttctttaaatattttggatacaattcctatgtcaggattatacattgcanatatactctctaacttctaccctgtgccttgccttttttattctcaagtcatctgtaatttgcattcttccgtcttttttcccgtcaatgttatcaggaattgtatacctggagagtataaaccatatactctctaagcacatttagagctactttctgtagatcttgatatgacatgttatcattatcattcagttcacaatattttcctctaatttctttttttaaattttattatta

SEQ ID NO: 622 - DNA, 401 bp, Artificial sequence
  /note="Description of artificial sequence: rs6072268"
  misc_feature (18)..(18): n is a, c, g, or t
agtaactttctgaagtangttttccaacttctagtgaaatcattaactggttctaaatctattggatctcaaactggtttccaccactgtgaacagaatggactgtagaagcagacctatgtataggtgggaatttagcatacgaagagagtacagatgcatttaaaaccatacggaaaggacagattattatgtaagtcatgttgggaaaactgcctgttcaacaacagaagaaacctcaacaagaaaacgtgggtgaatatttttataattgtgcagtagtgaagatcctttgaagcaagacataaccagagccataaggaaaggtgttttacatttgatacatcaaagttcaatttatggcaggtggacaccttcatgccatttaaaaaaaaaaaaaa

SEQ ID NO: 623 - DNA, 401 bp, Artificial sequence
  /note="Description of artificial sequence: rs6072269"
  misc_feature (307)..(307): n is a, c, g, or t
  misc_feature (309)..(309): n is a, c, g, or t
aaaacactgtagtcgatgagaagaatggtgccaaagtcccaggataagggaaagggtggcgttcggaatctcctcacggttactctgtgactgctgcagacaggctccttgcagatgctctcatacacctacatatatatatattttctctatttggagagtaatagactgtaggattgggtggtttcctgcattgagatacttctattaatatatcaatgactctgccaatttcatacctgaaaaagtggtaggttagttatagaagatctttaatattcctttgaggtctaagattctgttaaananttttgtttaaattgtgtaaaatacatatgacataacatttatcatcttaaccatttttaagtgtacaattcggtggcattaagtacattcat

SEQ ID NO: 624 - DNA, 401 bp, Artificial sequence
  /note="Description of artificial sequence: rs618486"
  misc_feature (80)..(80): n is a, c, g, or t
  misc_feature (351)..(351): n is a, c, g, or t
ctgtggtctggtttgagttaatgtttgtataaggtgtatgacttaaatcaatgttttcatcttccttttctttttctcanttatggatgttcaatttctccatcaccgcctgttgaaagaactatatttctcccattgaactgttcttgcatgtttgtcaaaaatcagttgagtatatttgggtgagtttgctattgagtactgattctgtttcattgttctacatgtctatatatgtgtctgttaataccacatagatttgaacatgtatattctaataccacataaatttgacacatgtaaattgtgtcaatttttaaaatgttaattgatataatcatgtaatattcntttttagcttattaatatggtggattatattgattaaattttaaatatag

SEQ ID NO: 625 - DNA, 401 bp, Artificial sequence
  /note="Description of artificial sequence: rs6072275"
  misc_feature (217)..(217): n is a, c, g, or t
ttaggaccatattataagtaagtacttataaatgtactttaggaccatattataagtaagtgcttataaatggctcagaacaaacaattatgtatatatatctgtaaatatacacatggagagagtgagcatacatgcacactgtgcaaatgatgaatggggtaaaatgttaacagtgaatctcggtgacggatgtatgcatgttccttgtgccttnttctttgcaagtttctttaagtttggggttatttctaaagttaggatttttttcaagagtaataattaggattcacttatatcttttaggtttttaagaacctacaactatttatggagaacaagcagcccgaggatgatctttttgatagactcaatgtgagtagatgaagcacacaatgttg

SEQ ID NO: 626 - DNA, 401 bp, Artificial sequence
  /note="Description of artificial sequence: rs6072286"
  misc_feature (191)..(191): n is a, c, g, or t
ggcagaatgaatatgctgcagccctgatgggctgtgctggctgggctttgccttcttgggtcaaggcgagcctgggcattaggcctttgtcattatgctatacatcaggcttctgggctgctacttgtgggatcctgcccttgttctcaaagagttcctccttctcactgccccatcttcttcatagtganggcctcttcatacccctggcttttcttttccccagagttcccctgaatgttgtcctctcatggttctgagttggggaggagtgctaggtcatggatttttgggtataacgtgtgactttcctactcccctaagtagttctccccttctcaagctcctaagttctgggaaggtctcttttcctgccctcctgactaatggcagagaggtct

SEQ ID NO: 627 - DNA, 401 bp, Artificial sequence; identical to SEQ ID NO: 378
  /note="Description of artificial sequence: rs2228246"
  misc_feature (60)..(60): n is a, c, g, or t
  misc_feature (140)..(140): n is a, c, g, or t
  misc_feature (374)..(374): n is a, c, g, or t

SEQ ID NO: 628 - DNA, 401 bp, Artificial sequence
  /note="Description of artificial sequence: rs6072299"
ctggtgtccagaatcactgcctggctccactgtaggtgatttcatttcaaaggaccctttttccttctgtcccaggccttcagggccaccccaacaaaattcaaatgctttgggtcttagaagctggggctttagtctttttcctccagaaagcccctgggtccttatgcatattccctaacccccgacaccgccccagcaaatgacaggctatgcttttcagcactctcacaggaaacagaaaagaacttgccagtgtcctctcaccagatgataccaggtttgactgtttgcctttgtctatttagcataatttctaaaatatcatagttttctcatgtagaagccagtgtggtgatctcagcaatgcagaagacagtgagttggaacttctctggtga

SEQ ID NO: 629 - DNA, 401 bp, Artificial sequence
  /note="Description of artificial sequence: rs6072300"
  misc_feature (346)..(346): n is a, c, g, or t
tttctaattttcaaaggcaccatttcctgtaattttctcaattcaaaaaaggacatgagggttaggctaaagtagagttcttgtttccaagtttggggacataaatataaaactttaaaagcatcctcacaaggaccagtgatgcccagcacccttgggcatgcatccagcacaccggccagaccctggggtgggagccacgggcactctgggtgttctgccagggatctctgcatgcaagtctttgtgctaaagaccaccctacctctgataattccaagaagtcaacaaatccctccagccttcacccttactaatgggccagtgtgttattccttcccaaacnataggaggctctgaaatgagtgtggagaaagggctctgaaaaccgcagtggtcaa

SEQ ID NO: 630 - DNA, 401 bp, Artificial sequence
  /note="Description of artificial sequence: rs6072302"
  misc_feature (158)..(158): n is a, c, g, or t
ttatggtccatgattcaaactcccatgaaaaagcagaattacggtaacaactaaagagaatggtaaagcatccaacgctaatcacattgccagtccattttttgaactgagggttacagcaggttctgcactgagtagcccacaaggcaaagcaagcntgacatgaaacgtagccggtcatcacttaatgcagcagagatctcttcaaaggtactgcttccttgaggaacacaaagggggcacaaaggggttccagacgtagctttgtgcctataacttccctgcctgactgtggaaggtgaggggcacctgtgacccagcaatccccagagaacagacacaggtcatttttagagatgacgtaactgacaatgcactgcttggctaaccaaagtttctac

SEQ ID NO: 631 - DNA, 401 bp, Artificial sequence
  /note="Description of artificial sequence: rs7261917"
  misc_feature (21)..(21): n is a, c, g, or t
  misc_feature (134)..(134): n is a, c, g, or t
aaacaagggtgtaaaattctntcagccaacagctaaaattattcacaagctaaaatttgtattcagtcaaagcaacacattaatcaataatatttataaagtatatcacagtgaaaagatggtaaagcacctcntaatggttaatgatagtgattggcctggagatgtggaaactagctatggaaactagatggttaaaacaaccacattccgtaccattagacgctgacagcccagaccccaccaaaatagaggcagtgaaacagcctttgaagttgttttcaaaggaagccaccaagatgattaaagggttggaaaatgagatttatgggtaatggccacagaaacgaagacaattttgcctaggcaagagaaaaggccgaagggtgacttaataacca

SEQ ID NO: 632 - DNA, 401 bp, Artificial sequence
  /note="Description of artificial sequence: rs6065325"
tactggtgagttggctgtctatacctgccttaccctccaaaagaccagaggcacagggcagaaggcctgaaagaccaggaaatgtcctcttttcagactttgggtatgggatccagggaggaggggctgggagtgggaaatgagaagttagggagcagagggataggggacaggggctagagagaagacagtacagacagcagagcaggactactggatgcctgcctcacttctagtggtttccagagtcattgctctaggtcttcttaggcctcgccactgagctagttcctgtgttttcttaatccatcacctgagaccatgtgagtacgtcttagtcccctatggcccaacagagccaaacccaggtgtcatcccgcgatgctggtggccacagccca

SEQ ID NO: 633 - DNA, 401 bp, Artificial sequence
  /note="Description of artificial sequence: rs6072317"
  misc_feature (186)..(186): n is a, c, g, or t
aaagtaatcttcagttcttcctcacccattacttatatatacaatatattattataaaggagacaacacagaatatagaaggcagatttctaaggtcccctattagaggtttataattcttttataaaatgttatcttttctcttcctcaacacaacaaacgaaccccattaaagtcaaaactganaactctggccaggagtctgttatatgtaagatgcctccttgttgatgttgctatagtcctaattaacagtcgacaggacatttcaagacttctcactcttatcaccagtcctggaaaagttgtctttttctataactgaggacatggaatcccatctctagggccacacaggataaaccaaagccaaccttgaccttaaggaaatttgtaaggac

SEQ ID NO: 634 - DNA, 401 bp, Artificial sequence
  /note="Description of artificial sequence: rs6065326"
aactcaggcagtctggttccgggcccatgctcttagcactacacaatcctgttgcctaagaatgcacaggcaaattgtcatctacaggaaagatacaatctatgaattagagttctggaggaaactgaattgaacaaaagattcaaatgacagaaggaaactactttcagcatggaaagacctgaaagaagaaacaagaaagcactcccagggtctcacacatcattagcaaagaggatccctgggacatgacctggaaacatctgaaaacaatgtgagaaggaagagagaaaaaaaactccaagtaaacaagttaacaaatagattacatgaaggggaatctagtagagttattttttatttttttaaataacagaagtctagaaatgagacaatctaag

SEQ ID NO: 635 - DNA, 401 bp, Artificial sequence
  /note="Description of artificial sequence: rs6072320"
  misc_feature (398)..(398): n is a, c, g, or t
tcaggctggtctcaaactcccgacctcagataatcctcctacctcggcctcccaaagtgctgggatgacaggcgtgagccaccgcgcccggccgttacgataaatttaaagtgaccacagtcatgatcagtacagaaaaacttatagtattcctggtcctcaagcttgagtgcacatgaaattcattgtgcagctttttaaatgttgatgtccacacctcccccaagacaaattgtctcagagtctctgagggtgagaccagggattagaattttataaagcttctgaggtgattttaatgtgtagccaagtagagatgcccactactatatacttaattacctaaatatctttaaaaatacaaagtaaaaaagtattactattaaccgttcataatnttc

SEQ ID NO: 636 - DNA, 401 bp, Artificial sequence
  /note="Description of artificial sequence: rs6072321"
tttttgtatttttagtagagacggggtttcaccatgttggccagatggtctcgatctcttgacctcgtgatccacccacctcagcctcccaaagtgctgggattacaggcgtgagccaccatgcccagcctacaaaagttttttttagaaaaatagccagcatgatagatattttcctatgcttgccagatcccttctaactttaaaattgcaacacccttactcaaccaaggcattagagttcagttgattggttgattcagatgatgccaaaagctatgggttcaatccactataaaccagttagctttgtttgcttcacatctacagatttttagtctggatggcatattttggatcataagaggaagcaggtaggagtgtggaagacaacatttgct

SEQ ID NO: 637 - DNA, 401 bp, Artificial sequence
  /note="Description of artificial sequence: rs6072322"
cacatttaccattaccttacattactgatgaaatattttcatcaccccaaaatgaaccttgtactcattaagcagtcacttctattcctcctcctcctcctcctccaactcctgacaaccactaatatgctttatgtctccataaaattacctcttgtggatattccctaaaaatgcaatcaaacaatatgtgaccttttcggttggctttctttcactctgcataatgtttcaaagttcatctacattgcagcatgcatcagtacttcattccaatttatggctgaaaaatattccactgtatatagatgcacatcttgctcatccattcattcattgatagacatttgggttgtttccatcttttggctattgtgaatagtgttgccatgaacatgagt

SEQ ID NO: 638 - DNA, 401 bp, Artificial sequence
  /note="Description of artificial sequence: rs8121001"
  misc_feature (300)..(300): n is a, c, g, or t
catgcccagctaattttgtatttttagtagaaacagggtttttgttatgttgcccaggctggtcttgaactcctgagctcaggtgatacactcgccttggccttccaaagtactagtattacaggtgtgagccaccatgcccggcctcaaaactctttagacatcgccatcagggtgcatgtgtgtgtgcattcacatgccagtgattttctataccctggaaatgagagccctctcctccacatctgtccagctgtggtagagcttcccaaagtccataatgcagggtttcagctctcnactaactatgcagttgaatgacttcctataaaaacaaggtcacacaccactaagggcaaaagcaaatgcatctcctggggagacagtcactgaacattaac

SEQ ID NO: 639 - DNA, 401 bp, Artificial sequence
  /note="Description of artificial sequence: rs6072338"
ctagtgccacatcagacacactgaactaaggtacaagggtgctagaatgaaacaaaaaggataggtagtctagtagaactgataaaaggcagattgtggaggtcttcgtaaatatcagactgtggagtataacttttattcaaaacacaatgagaagcaaaaatcaactcccacttccaagctccacacagtaattttatattttacctgccttcaaagaccttactgcatcatctacccttggctatcagtggataccaatgctccactttacacaaaaaaatagaagcttttacaagggcaaaaattccagccccttgccttctatagacttctctgtatccccaaatagcctttcctctttccacacagtcaaatgaaacaggcactcctcctctggc

SEQ ID NO: 640 - DNA, 401 bp, Artificial sequence
  /note="Description of artificial sequence: rs6065333"
  misc_feature (326)..(326): n is a, c, g, or t
  misc_feature (393)..(393): n is a, c, g, or t
ttcaaaatgtatttccaggcatgagactgctacactactgagccctatgcatacttaattttactcagaactactggcttattttatagaagggctgagcaagtttatattcccaccagtccaatctcttcacatgggtttctgacccttcgcgttgcagtaacactgagacgatggatgttcattcctggtgccccgatccaatttgaaattgacttcatggtcactgacaaattattcttcaggttgtggcagggctgaggccatttcctagtgacttaacagatggaatttgttctctattttcacttgctttttaaatgttntcggggaggggtgcctgttagagacaggagcactacagactgtcttccctaggcactccctggcagncttctaag

SEQ ID NO: 641 - DNA, 401 bp, Artificial sequence; identical to SEQ ID NO: 17
  /note="Description of artificial sequence: rs6072343"
  misc_feature (85)..(85): n is a, c, g, or t
  misc_feature (177)..(177): n is a, c, g, or t

SEQ ID NO: 642 - DNA, 401 bp, Artificial sequence
  /note="Description of artificial sequence: rs6065347"
  misc_feature (71)..(71): n is a, c, g, or t
  misc_feature (218)..(218): n is a, c, g, or t
gacacagtgtcctgggattggtggcagggcctgctggagcccccagctccctctttccaccccccatctanggcctggcctgaccttcctccccagggcaaggaactggcctggctcttatcctggaggaggctgcagctgctcctgcagccctggtcccagcagacaaaggcgctttctttcctagtacaaggtcttgactgcatgttgccctgganccaaaagttcctatggaggaagcagtttcctcccagggtgtgtgtgtgtgtgtgtgtgtgtgtgtgcacgcacgtgtgtgctgggtttcagggagttgggctgtcagggagtgcaagccctctcccagcctcctgggtttagcctggcattgctcaatctgcatcctttgtgtacatctctaa

SEQ ID NO: 643 - DNA, 401 bp, Artificial sequence
  /note="Description of artificial sequence: rs8005889"
  misc_feature (249)..(249): n is a, c, g, or t
tgaatgtcacttattatttagggaaaagttaataatctattgccagtttttctctgtgtgaaaaacataaattccatgtatattttcatattcttcaataggcacaagtagaatgtaaattcagagagagagggaaaaaataagttgttcagtagaataaagctctaaaacatgaaatgactttattttaaaactcaaatccacacagtatttattaaaaacagtggattacacattctgatatcaacnttagaactaattaaattatatcaaccccgttatctttttttcctcagagactaagttcagtgtttcatccatagcccattaaggataaatgttacacacatcttcttcagaaactgtgttagtagctgaagcatgtaaaaattttaccactg

SEQ ID NO: 644 - DNA, 401 bp, Artificial sequence
  /note="Description of artificial sequence: rs7161171"
  misc_feature (182)..(182): n is a, c, g, or t
tcaaataaaagtcaatttatttgcagatttccaactggaggacaaataatgaatatatatatgtatataatgtttagtatttggtgtgtgcagtatttacccatgctttttgttactgacacatagtttacttctaatccagagacatttgactattgtaaattaaaacctattcaacaatntgcattggagcagatatacaagaaaaatttattcctccatgtggagattctgcctcagtacaatgaatataaatatgccaatggcctgaagacatcctgccaaagagactgttttgttcagtcttcttactggaaatcagcacgaactcttgtggctattcaggattatttttcccactttatttttctacattctaatttaagtattgccaacatttg

SEQ ID NO: 645 - DNA, 401 bp, Artificial sequence
  /note="Description of artificial sequence: rs6572078"
  misc_feature (251)..(251): n is a, c, g, or t
  misc_feature (309)..(309): n is a, c, g, or t
tgtatacacatatgatgcaatactactcagccacaaagaagaaaattatatcttttgcagagacataaatggaactgggtgccattatactaagtgaaatagctcagaaacacaacgtcaaatactgcatgttttcacttataagtgttagctaaacaatgggtacccatggacagtgtagagtagtagacattggagataccaaaagcttggagggctggaggagggatagggttgaaaaaataccttantgggtacaatgttcactatttgagtgatgggtacactaaatgtccagacttcaccacnatgcaatatatccaagtaacaagactacatttgtactccctaaatctgtttaaatattgagaaaaaataattttaatgttatgttgcaattt

SEQ ID NO: 646 - DNA, 401 bp, Artificial sequence
  /note="Description of artificial sequence: rs6572079"
actggataagtctttgttttgaggggctgtctggtacattacaggatgttgagcatcagcctctggatgacagtagcacaccaccccgagctgtgacaactaaaactatctccaaacattgccaggtgtccctgagttgtgtgtgtgtgtgtgttgggtgatggtggtgtggggtaatcttagtcgagaagtgctgctttattgttagaagattagcagataaagacattgttgccaatttaatatatttggaatttattaatgctttaatatgtaaaccagttaattctcttttctacattgggaattttaacagaaacagcaaatcgtgatttgacatttattcacccattgatctctaggcatacttggtctaagatgggaacatctgaactattagc

SEQ ID NO: 647 - DNA, 401 bp, Artificial sequence
  /note="Description of artificial sequence: rs8019332"
ttctttctataaatacaataacagcaaactcaattgaataatctatattttattctactgcaaagtctacttatgattgagtttaataacacaacatagtccaaatttgggctttataaagactttgatttactacatgaaccttttagatatttatgtacaaacgttaaattgtaacttgacatttggtagattgactcctttacaatagtaaactctgggaaaaagaagagattttataaacaataattaatgaaagactgataatagtccagttatattcagaaactaaatttatacaatttaattttttgtgtgtggaggccaatattattactctatttcgataatagcaaaagctagaaatcacatgaactttcaaaatgtgttgaaaagttaaa

SEQ ID NO: 648 - DNA, 401 bp, Artificial sequence; identical to SEQ ID NO: 83
  /note="Description of artificial sequence: rs7146332"
  misc_feature (40)..(40): n is a, c, g, or t

SEQ ID NO: 649 - DNA, 401 bp, Artificial sequence
  /note="Description of artificial sequence: rs761021"
  misc_feature (39)..(39): n is a, c, g, or t
  misc_feature (54)..(54): n is a, c, g, or t
  misc_feature (66)..(66): n is a, c, g, or t
  misc_feature (399)..(399): n is a, c, g, or t
aggaaaatggattcacttggctgtgttctacgtgcaacngcatctttgcgtgtntttgtttgtttnttcctgctaccctttagggttggacgtccttgtcaatgttctctgcagtcccaagcagggtatttgatagtatagtaaggccctccctgttagaccttgccagtttgcttatgggaatacaattagagaagccccggtctttaatcctcaaggggaatctattacacagatatttgagcagctgcaaattgcttttggaatgaggtagaacataaatgaattaataaggttaaaaattctaatgctaaagattttattggtaatacttccgttaaaatgcctatatatatatatatgtatatatatttttttggggacagggtctctctctgngt

SEQ ID NO: 650 - DNA, 401 bp, Artificial sequence
  /note="Description of artificial sequence: rs6124987"
  misc_feature (101)..(101): n is a, c, g, or t
ttccagctactcaggaggctgaggtgggaggattacttgaacccaggaggtggaggttgcagtgagccgagatcgtggcactgcgctctagcctgggcaanagagcaagacttcatctcaaaaaatataaaaatttaaataagtaaataaattccggtgtccattaaaaaagtcttaactgtctacggctgctctattttattctatctagctagctgtttattgagctagggtctcactctattgtccaggctggagtgcagtggcacaatcacaggtcattgtggcctcaaactcctaggcttaattgatcctcccagctcagcctcctcagtagctgggactacagcagcttgtggctacgttactgcaacaatgactaaatagttgcagagttggaa

SEQ ID NO: 651 - DNA, 401 bp, Artificial sequence
  /note="Description of artificial sequence: rs6124990"
  misc_feature (114)..(114): n is a, c, g, or t
gttattgataattataagcccaattgtgatccaattttattcttggttttcaatacacactcaagaaacagatcctgtcctcttacattaagattgacaattacaatacgcacngtaagttaaaaagatgctttaacaaaatcagcactttctcccctgactgatttgacgttcaacgatttacttgagaaattaacgccctcttcaatttttcttcttggtttttaattctatggggctgacaaatctacatgactcattctttttgttaatagtcattagcacatataatttagcctatgaaaatcgaaggtaattccttgccacactcaacataaaaattataccatagcaaaaaaaaaacaaaaaaattgtgcaaaccaaactaaggctacaccttt

SEQ ID NO: 652 - DNA, 401 bp, Artificial sequence
  /note="Description of artificial sequence: rs7158518"
  misc_feature (290)..(290): n is a, c, g, or t
caaatatatattcttgaaacctttgttgaaatgagtaggctgtaaatatgtggatttatttctgggttctctattgtattcattcattcttacactactagaaagaactgcatgagactgggcaatttataaaagaaagaggtttaattaactcgcagttttgcatggctggggaggcctgaggaaacatagaagcatagcgtaaggggactcaaacatgtccttcctcacatggtggcaggaaggggaagtgctgaacaaaggggaaaagattgttatagaaccatcanatcttttgagaactcactatcataagaacagcataaaggtaactgcccccataattcaattacctcccaccagatccctcccacaacccatggggattatagaaactacaa

SEQ ID NO: 653 - DNA, 401 bp, Artificial sequence
  /note="Description of artificial sequence: rs7182941"
  misc_feature (220)..(220): n is a, c, g, or t
  misc_feature (284)..(284): n is a, c, g, or t
agttttgttctcgatgactgttctaaaaagcagaaattagggagaataagagaacatttctaacctctaagaatgatattgggaaagagatatttccactgttaaactctcagaaaatggtctgattcaatgtgtctaaaagagaaagactctcaaatacgctatccttgtgatcaacagcctcatcgttctcatttataaatatacatacacacccccnaaaaatcatgctgtactgtgaagtagatgtttatggtcacagtgcaggttgatgagagtcaacngaaagatggcactggtcctctcatatgtaaccatggaattattgcttacaaatgtaagcagactcagcaagtgttcatggaaactcattaatgatgtgttcatacttgctcatgaag

SEQ ID NO: 654 - DNA, 401 bp, Artificial sequence
  /note="Description of artificial sequence: rs7183074"
  misc_feature (182)..(182): n is a, c, g, or t
  misc_feature (265)..(265): n is a, c, g, or t
gttctaaaaagcagaaattagggagaataagagaacatttctaacctctaagaatgatattgggaaagagatatttccactgttaaactctcagaaaatggtctgattcaatgtgtctaaaagagaaagactctcaaatacgctatccttgtgatcaacagcctcatcgttctcatttatanatatacatacacacccccaaaaaatcatgctgtactgtgaagtagatgtttatggtcacagtgcaggttgatgagagtcaacngaaagatggcactggtcctctcatatgtaaccatggaattattgcttacaaatgtaagcagactcagcaagtgttcatggaaactcattaatgatgtgttcatacttgctcatgaaggaaagttgtgcacacccga

SEQ ID NO: 655 - DNA, 401 bp, Artificial sequence
  /note="Description of artificial sequence: rs8028748"
  misc_feature (39)..(39): n is a, c, g, or t
  misc_feature (138)..(138): n is a, c, g, or t
  misc_feature (184)..(184): n is a, c, g, or t
  misc_feature (241)..(241): n is a, c, g, or t
  misc_feature (277)..(277): n is a, c, g, or t
  misc_feature (301)..(301): n is a, c, g, or t
  misc_feature (370)..(370): n is a, c, g, or t
aaagtgccccacacaccaccacaccttccctgaattttngggcaatgcaacattatattcttgccccattggaaacccttttcctggaaagcagaaaagaagagaagaaagaacaggactgggtttgagaacttctantctttatctataaaatagagattaataccccaatctcagttgtcanatagcaggcattctataaatactttaatttttttgttttcattatttttatttatanaataaactgaagagtcaaagggtggggatattttanacaagatttggacaggatcttaangtcctgcctcttcctgcctctaatgacaagtatttccaaaatctgatttccgcatggtttatttaaganaaaaagaatccgcacctacttttactgctat

SEQ ID NO: 656 - DNA, 401 bp, Artificial sequence
  /note="Description of artificial sequence: rs7165903"
  misc_feature (248)..(248): n is a, c, g, or t
  misc_feature (388)..(388): n is a, c, g, or t
aagacttaaatgagatatttgaagtaaagcaccatgagtattcattcaacaaatatttattcagcacctgttattcaccagtgaacccaaagtgattcaagctctcgttctccacaaggcctgggtgtttcacctctgagagttttcctgcatcttcttatttcactttggaggctcacaataaagcctgttactttgaggtcaacagagcatgtctctttgccttaaaacttgcagaagcaaagcangataacattggtaaaactaccacaaaaactttaaaaacacaattggaagggatttttatgagtacttccaagcataaggaaagatttggcaagtgaagcccaacattgcctttccttccttgagaagctggaaactgagnaactggaaatctt

SEQ ID NO: 657 - DNA, 401 bp, Artificial sequence
  /note="Description of artificial sequence: rs7173200"
  misc_feature (190)..(190): n is a, c, g, or t
  misc_feature (346)..(346): n is a, c, g, or t
tctctggttaacagtttaaaaatcaaggtgcaacatatagtatttaaacaaatataaatctaccttgcagttagctgaagtttctccttctgactctttttgagagcaaataaattggtaagcagaaacaataaaagattttgggtgtttttccctcagtttgtttgcttgattttgtttcctcaatagngtagatacacaacaataaattttacccgaggtttcaacaaaccccatctctgctactgtcatatgatttaccctcgttattataagacttaaatctgaatattagtataatagagtgttacccgtagtcttttagtttcttatttcacattttaanatctaaaaaatcactacaaaaactgattcagtgagaagcctaagctaagatggtg

SEQ ID NO: 658 - DNA, 401 bp, Artificial sequence
  /note="Description of artificial sequence: rs7173250"
  misc_feature (45)..(45): n is a, c, g, or t
  misc_feature (56)..(56): n is a, c, g, or t
tgtttttccctcagtttgtttgcttgattttgtttcctcaatagngtagatacacnacaataaattttacccgaggtttcaacaaaccccatctctgctactgtcatatgatttaccctcgttattataagacttaaatctgaatattagtataatagagtgttacccgtagtcttttagtttcttatttcacattttaacatctaaaaaatcactacaaaaactgattcagtgagaagcctaagctaagatggtgtactctcataagtaggcactgtcggttctaatgggaattctatttctgggtctcattgccttttcacaatttccatagcacaggctttgtgattcccatggtgcacacgaaaaactcaccctagagaagtagatgttctagctca

SEQ ID NO: 659 - DNA, 401 bp, Artificial sequence
  /note="Description of artificial sequence: rs900634"
  misc_feature (274)..(274): n is a, c, g, or t
aagctcaataaatgtaccgagaattttacaagacaaaaatgagctggattagaaatgaaaagatgataactggtatgctctgtttaataagataagaaagaaaaagtgcaacatgttaataagatctctgtttttagttctgtgaaataaaatgtgaggttttcaaaaggcaagcctcagatatttggaaaattcacttacgggatgcctcattacccggtgggcccaggatccgatgcctggtgttccgacattcttggaaaacattactccnttaccattagatgcagctcctgcctttgaagacattgcagtatagtatattttacaagtgccagagtcctaaaagagcagcgactttctccatctgcagaggcaaaacctgagccgaggcaaggaaa

SEQ ID NO: 660 - DNA, 401 bp, Artificial sequence
  /note="Description of artificial sequence: rs7166014"
  misc_feature (280)..(280): n is a, c, g, or t
atgcagctcctgcctttgaagacattgcagtatagtatattttacaagtgccagagtcctaaaagagcagcgactttctccatctgcagaggcaaaacctgagccgaggcaaggaaagtgactttctcaaggtctcacaataatcaggggcagagacaggccccaccgacagcccctgattctaggcctcctgttgtttccgggaaattaagcccagtcccagagaataataataaatttggcccctgcaaactgcctgtctacctagctcacccttgtnaatagaggagaaaagccaagaccgttggcaaaaaggacctagggaatttgggagtgtgcctaataagaggaagctgaactcaccttgcttgctagatcccacagccctctctttcactaaa

SEQ ID NO: 661 - DNA, 401 bp, Artificial sequence; identical to SEQ ID NO: 42
  /note="Description of artificial sequence: rs6868846"
  misc_feature (279)..(279): n is a, c, g, or t

SEQ ID NO: 662 - DNA, 401 bp, Artificial sequence; identical to SEQ ID NO: 37
  /note="Description of artificial sequence: rs7901463"

SEQ ID NO: 663 - DNA, 401 bp, Artificial sequence
  /note="Description of artificial sequence: rs7903523"
  misc_feature (293)..(293): n is a, c, g, or t
tagtgtttcagttgtttctttccagcaaatcatttcattactctaataggctggtagtgtctggatggggcagtatgtgatatgaccattgggtctcctggttatggctctcactctcatacctccttctctcccataccttcagtgggttctctgatcagatgctgtattgtctaggattctatgactatggatcaggcattccatagccagaccctccaaatctgataaaatcccatgcagctatcttctactgtgatgcagtaacagagagacccaattaattaattttnttgatgtagatcctgtaaaaatacaacttaagagtgcaattggtacaaagatagaaacaaatctacacatactagtcacctaacttatgacaaaaatgacactgctgt

SEQ ID NO: 664 - DNA, 401 bp, Artificial sequence
  /note="Description of artificial sequence: rs919166"
  misc_feature (246)..(246): n is a, c, g, or t
gtctaggagcatacacagtaaaaacgtataaataatatgatttgataagatacaagcacaataaaaagttagaaaagaaaaatactaaatacacgttaaatgtatacatgctgaagagattgccagataagagtgtttacatagcgtagtggaacaagtgaagaaatgtttccttagagaataatatattaagaaaatgtccatgtcacctgtattggttcagaaagagttatttttgaaagcacntggttgtcttaggattaaactgcctagcccttagggaaggagacaagggcctgttcattcattcattaactcataatatattaaaattgtgcttgctatatactaagcacagtattaggcactagaaatagggtatggactatgaccaacatgtt

SEQ ID NO: 665 - DNA, 401 bp, Artificial sequence
  /note="Description of artificial sequence: rs919167"
  misc_feature (156)..(156): n is a, c, g, or t
taagatacaagcacaataaaaagttagaaaagaaaaatactaaatacacgttaaatgtatacatgctgaagagattgccagataagagtgtttacatagcgtagtggaacaagtgaagaaatgtttccttagagaataatatattaagaaaatgtncatgtcacctgtattggttcagaaagagttatttttgaaagcacatggttgtcttaggattaaactgcctagcccttagggaaggagacaagggcctgttcattcattcattaactcataatatattaaaattgtgcttgctatatactaagcacagtattaggcactagaaatagggtatggactatgaccaacatgttgcttatcctcttggagcttacaatataacagggaagatagacctt

SEQ ID NO: 666 - DNA, 401 bp, Artificial sequence
  /note="Description of artificial sequence: rs6481390"
  misc_feature (237)..(237): n is a, c, g, or t
catcctcaccaatacttgataaggtcagtctttttaattttaactattctgatgggtatgtatacagtgatacctcattgtggttttaatatgcatttctctaatggttaatgctgttgagcttttcatgtgccatttgtatatcttctctggtgaagtgtcggattaaatcttttgcctaatttttaattggaatgtttgttctcttattgttgagttttgacagttctttatatnttccagatacaagttcgttattagatataggctttgcaaaggttttctcctagtctgtggcttgccttttaatttttgttctttcatttcattttcattctttcatttataaaacagtgttattcaaagagcaaaatgttttcattttgatgaagtccaattta

SEQ ID NO: 667 - DNA, 401 bp, Artificial sequence
  /note="Description of artificial sequence: rs7071862"
  misc_feature (169)..(169): n is a, c, g, or t
  misc_feature (391)..(391): n is a, c, g, or t
tgaagtccaatttaccagtgtgttcttttatgaacttttttggtgtcatacctaagaaatctttgccttaccaagatcatcatcataagtatttcatatcttcattaatcttataaatgttaacacttctaaatttcaacttctgacactttgttgctagtatatagangccatgctattaaattcctctccatcatgtccagaggcacacaatgcctggctatcccactcttagtgatgttaaattaaccaatgagtttagatagtgtcaacatgatctattcattaaaaaggttctccatcaacctttcacttaatatttttggacgattcaaattgcctacataaattatttcattagaggttccaagctgttgattttttgattccnttattcttct

SEQ ID NO: 668 - DNA, 401 bp, Artificial sequence
  /note="Description of artificial sequence: rs7896213"
  misc_feature (11)..(11): n is a, c, g, or t
  misc_feature (364)..(364): n is a, c, g, or t
ccatcatgtcnagaggcacacaatgcctggctatcccactcttagtgatgttaaattaaccaatgagtttagatagtgtcaacatgatctattcattaaaaaggttctccatcaacctttcacttaatatttttggacgattcaaattgcctacataaattatttcattagaggttccaagctgttgattttttgattccattattcttcttgcatttactagctgtgattcatttatgaagaaattttcctggtcccctattttattagcctaaaatatagaatgtggaaaaagaagtataaataattgattctcttttttactttattatttttataatacatatttaatactctagaaacnactaaaagtcgtcaataatgttttatttttggaatat

SEQ ID NO: 669 - DNA, 401 bp, Artificial sequence
  /note="Description of artificial sequence: rs7900673"
  misc_feature (148)..(148): n is a, c, g, or t
  misc_feature (267)..(267): n is a, c, g, or t
ttactagctgtgattcatttatgaagaaattttcctggtcccctattttattagcctaaaatatagaatgtggaaaaagaagtataaataattgattctcttttttactttattatttttataatacatatttaatactctagaaacnactaaaagtcgtcaataatgttttatttttggaatatcttaatgaacacatgcatttatatttagttgatgtatttcagttcattggagcccttattttttggatgcttgaattgtccntctttggccagtatgagctctttcttattggtcttttttcagtatgactctagtagccattcataactttcttgctttcaggaaagacaagatgtcccagattcatcctgtacatttcctattctggatatcaa

SEQ ID NO: 670 - DNA, 401 bp, Artificial sequence
  /note="Description of artificial sequence: rs7916849"
  misc_feature (82)..(82): n is a, c, g, or t
  misc_feature (135)..(135): n is a, c, g, or t
aatgtggaaaaagaagtataaataattgattctcttttttactttattatttttataatacatatttaatactctagaaacnactaaaagtcgtcaataatgttttatttttggaatatcttaatgaacacatgnatttatatttagttgatgtatttcagttcattggagcccttattttttggatgcttgaattgtccatctttggccagtatgagctctttcttattggtcttttttcagtatgactctagtagccattcataactttcttgctttcaggaaagacaagatgtcccagattcatcctgtacatttcctattctggatatcaaatggctatttctataaggtgctctggctcccgtcctggagaaatgatatgaagtgatcacaatcta

SEQ ID NO: 671 - DNA, 401 bp, Artificial sequence
  /note="Description of artificial sequence: rs7084955"
  misc_feature (95)..(95): n is a, c, g, or t
taattttcctttattagacagtgagctccttgggattataatcttatgtctttgtgctgttagatgcctgccacagtacatgaccagtaaatttntaatgaaaggaaggctggaaaggaacctccattttcccgggatatatattaaaaatcccttattgcaacatcactatttggcagctgctaagaatgacagctgccaaatggtgtagaagaatgtgtcgaaaggccccatggggtgtgataaattacactagtataaatcattctttttaaacttttaaagcatttttataattatcctatttgaccctcacaactgagaaatatgtaaattagtagctttatccctgttttacacataagtaaacaaggcccagagaaactaaatatttacctaag

SEQ ID NO: 672 - DNA, 401 bp, Artificial sequence
  /note="Description of artificial sequence: rs7085387"
  misc_feature (344)..(344): n is a, c, g, or t
  misc_feature (399)..(399): n is a, c, g, or t
ttctttttaaacttttaaagcatttttataattatcctatttgaccctcacaactgagaaatatgtaaattagtagctttatccctgttttacacataagtaaacaaggcccagagaaactaaatatttacctaagactatatgctagtttggggccaaatttggtctagaattcaggtttccagatgtttaaacccaggatctttttaatagaccagtggttctcaaactaaggattacttagggactgctattgaacagggatgggagagaagatagagggtgaaagatcaggaatctgggccccctactcatgttacaattctgcttttgtctcttctacntgtaagtgttccatagaatttatcacttggaaaatagctctcttgctgataacanca

SEQ ID NO: 673 - DNA, 401 bp, Artificial sequence
  /note="Description of artificial sequence: rs7073985"
  misc_feature (235)..(235): n is a, c, g, or t
  misc_feature (260)..(260): n is a, c, g, or t
  misc_feature (335)..(335): n is a, c, g, or t
ctccaaggagttctggtttctttaggtggaaatgagatttagaatccagtatctgggctctaggtgggctcgtcgctactggtgcctcattgcttctagctctttacaggagacagtgataggaaactgcttttctaaaataaaaaatataaaaaaaagaaaaaaagataaaagaaaagcctgagtttctagtaatacttataattcacatgcattaccacatgattatttcttnccttctcccattccatttttgtatntccttcttccatagtgaaaaccctgcttctcaaacaccaccacaaacaatatttgttcacttctattctgcaatncacacagtttttgagctacaacaccatacacctgttaaaaacaaaactagtaaatacagtcaaatt

SEQ ID NO: 674 - DNA, 401 bp, Artificial sequence
  /note="Description of artificial sequence: rs7077653"
  misc_feature (167)..(167): n is a, c, g, or t
  misc_feature (226)..(226): n is a, c, g, or t
  misc_feature (301)..(301): n is a, c, g, or t
agatttagaatccagtatctgggctctaggtgggctcgtcgctactggtgcctcattgcttctagctctttacaggagacagtgataggaaactgcttttctaaaataaaaaatataaaaaaaagaaaaaaagataaaagaaaagcctgagtttctagtaatacttntaattcacatgcattaccacatgattatttcttaccttctcccattccatttttgtatntccttcttccatagtgaaaaccctgcttctcaaacaccaccacaaacaatatttgttcacttctattctgcaatncacacagtttttgagctacaacaccatacacctgttaaaaacaaaactagtaaatacagtcaaatttctttgcatttctcgtaattcttcaaaaatattt

SEQ ID NO: 675 - DNA, 401 bp, Artificial sequence
  /note="Description of artificial sequence: rs7077537"
atgtgtgagaatctttgaatttcagataattactgagagaaaggactttgctttgtagctccaggagctagtactgtggctaggcatattagaccagtaatagctgtgttttgaatatgtaaatcaatgattaaatgaatgattaattcacttgtcttgtgatgagagttttaagatgtttcttgccatctggatgcagtatgatttcaagtgtcccctctgatactggcaaggtctggagagccattaagacaaagagtttactcctgtgagctgggttctacggaagtctggaatgctgccctgagaacacaatctgcaacagtatctgtctgagatttttggttttgtttcctccaccactataaacccaagcatttccatgggctcccttctgaaaa

SEQ ID NO: 676 - DNA, 401 bp, Artificial sequence
  /note="Description of artificial sequence: rs7111608"
  misc_feature (59)..(59): n is a, c, g, or t
ctgaagcaggagaatcgcttgaacccgggaggcagacgttgcagtgagccgagatcgcnccactgcactccagcctgggtgacaaagcaacactccgtcttaaaaaaaacaaaaaaacaaaaacaaaaaaaaaaactggccatccagcttcgttaaccagcgtgtccctggacatgtcacttcacctctctagtacccagattgtcttcactgcaaaatgaaaacaccaccatgtaccctgcagggatcttggaaggatccaaaacctgggcaataaagtacccaatacttcgcactcaagactcagcgtgttgcggggacatagcccacaacagtcattaagaaaatcaagccaggcccagcggctcatgcctgtcatcccaacactttgggaggccgag

SEQ ID NO: 677 - DNA, 401 bp, Artificial sequence
  /note="Description of artificial sequence: rs6591651"
  misc_feature (224)..(224): n is a, c, g, or t
ccactgcccaggacataacctcaatgctcattcatctgttcccatcagccccttcccatccccagttacctgggcaggtggccccttgctctccatcctggcaggagcagacattgggagcgatgcagatgccactcccacagccgaaggagcagagggctgagaggagaagtgcaggtgagacacgaggaactggggccccccgtctgcccctcggaccaggnactgagggctggcaacacacactgctggaggagaagacttggggcacagggacaagcacttacgcagggtgcagtgcccaccacccatagagggcgcccagccagggcagcagccactcccaaacccagagaggcagacgtgggggcccagtcggcgtctgcaagagaagagagagc

SEQ ID NO: 678 - DNA, 401 bp, Artificial sequence
  /note="Description of artificial sequence: rs921635"
tcctaatgcccaaactggcaacacagcctacgcacaaatgtttaccttttatataactacttctgtaaagtggccttataaaacctagaggagacatctacgtcctccctgatccttgtacacaccgaaatgacactattttcagcttgggtcctcagaatctatatggcctaagccttcctggcctgtctaaacacctacgcaggctggtatttgtcccattttctctaagggaaaactgaagccctcagtgcactcaattacataccattagggcttctgaatctttgaattcgatccaaattgaagagaaagctcagttttcaatggataacgaggacaggaatgacgtgagaatgactatatttcaagtaggataatgtcctaaaataatgagataa

SEQ ID NO: 679 - DNA, 401 bp, Artificial sequence
  /note="Description of artificial sequence: rs896831"
ggattcgatgcagctggttttgtgctcacctggggagcaggagcctcttactggtttctggatttctcacagggaattggtttgtttgttgctgttggctcagtgtctccatcggggaaggaggatctggggtttcctactccaccatcttcacctcttgctgaggtcaccaccttgacatcatatcttgataagttgtcaacttctctggattgggagcctttgggggattagggatcatgctgtctctgtgtgctcaggatttgacacaggtgagtgagtagagtataaaccacactgtaagaattttaagggagtgcaaaggaaggaaaaattatttctgctgggatagtttctggaaaggcactggttagggacacatttgcagttaggactgtgtt

SEQ ID NO: 680 - DNA, 401 bp, Artificial sequence
  /note="Description of artificial sequence: rs879647"
agcctaaactgtcctattttcacattatgctgcttatcatacccagtacctgtggcccagtagtaaatatcccagtcattactaggctcgttaatcaggcggtcatagaggttcagctgcttttctgtcatgtgctgcagatgttctttagcaaaaagactaaaaacaagaaagaaaaaaagaaaaagaggttgagaaggctgtgtctaataaaagagaagtgacaccaagactcctactcctgggagtctctctgaacctactctggctcaggaagctgcccgatttaaaaaaaaagactcctagtcccatacctaagaagaatgcagttttccaacattcccctctttctgctctcatagagcaggcgggctcttttggtttctatggattcatcagtt

SEQ ID NO: 681 - DNA, 401 bp, Artificial sequence
  /note="Description of artificial sequence: rs720888"
  misc_feature (64)..(64): n is a, c, g, or t
  misc_feature (191)..(191): n is a, c, g, or t
  misc_feature (312)..(312): n is a, c, g, or t
  misc_feature (361)..(361): n is a, c, g, or t
tgacctgcagatgagaaaccctggatgtagctatggtgacctcattgatatgccaggcaatttntgttagggacaggttttaagtctcagactgaggctatgactaaatgctgacattcatatctagagtacatactgtgcaagttaccatgtaagagctttgtgtgtttcatctcatcaactagctgagncaggaagcactgtcatccccattttatagatgaggcaactgaggctcaggtcaattcatgtatccagcaggtaagcagcagagccaggatttaaatgtgtaaccagtgcactgcgctgctncctcacagaagcttcactgggtgatcaagttcagatctactcacttggngaagcacctggcagattcctacccaccatgtaacacagag

SEQ ID NO: 682 - DNA, 401 bp, Artificial sequence
  /note="Description of artificial sequence: rs720891"
  misc_feature (355)..(355): n is a, c, g, or t
tcaggataagaagggatcaaacccgagggggagaaaagttccaactacatccttggctactggggtttgttgcataacgtgcaaaggataaatgggtaagtcaccgcccaattcatgtgcacttcgtacagtccagatctatgtctatatataaactcccggcctgcttaacattctccccagggtacataaatgcagccagagagaatagccagagtcttcagcaagctcccagggagacgtctccttcctcgcctgccctgcttctgcgagtctcacttccattccttgcttaggggagagtgctagatttttccatcaaaggtcttgtcaccagggtctgttttctctctcntcttcactgggaggtaagacattctgtggttctattaataggctca

SEQ ID NO: 683 - DNA, 401 bp, Artificial sequence
  /note="Description of artificial sequence: rs6591654"
  misc_feature (285)..(285): n is a, c, g, or t
tggaggttgcagtgagccgagatcgcgccattgcactccagcctgggcaacgagtgaaactgcgtctcaaaaaaaaaaaaaaaagagaaagctaattggaaaaacactgtcatggtcttcactaaatgctggggatagagaagaatgcatcttgtctgtccttgaggagctcactgttcttggtgctttatttcattgatcgccaagcagaagttgtctgcactagcatagcacaatgtgctacacccagtgccagacacagaagacgcggagatcaatgagatngagctcgtgccgcagaggtcctctgaagaagggataagtgaatggaaggcacgaaaggatctgtctatgggcctcaggcactgaccctgtgagagcaggcagcaggacatctagcc

SEQ ID NO: 684 - DNA, 401 bp, Artificial sequence
  /note="Description of artificial sequence: rs6591655"
  misc_feature (117)..(117): n is a, c, g, or t
gagaaagctaattggaaaaacactgtcatggtcttcactaaatgctggggatagagaagaatgcatcttgtctgtccttgaggagctcactgttcttggtgctttatttcattgatngccaagcagaagttgtctgcactagcatagcacaatgtgctacacccagtgccagacacagaagacgcggagatcaatgagatagagctcgtgccgcagaggtcctctgaagaagggataagtgaatggaaggcacgaaaggatctgtctatgggcctcaggcactgaccctgtgagagcaggcagcaggacatctagccttgtatgccaggtctatcctcacagcagggatgaggacaccaggccactgagctctgagacacctacttttaatatagaaataa

SEQ ID NO: 685 - DNA, 401 bp, Artificial sequence
  /note="Description of artificial sequence: rs729404"
  misc_feature (175)..(175): n is a, c, g, or t
ccaccgtgcccggcccttgaatttttaaaaaggcagctgcttagtatagatcagattcttgtgaacttagtatagcaatcgcctatgaacacacatgattcctactgatctatttgaacagcagcaataacatttactgagcacttattccagagcagacattaggctaacaccntacatggcttgtcctgctgaattccatagcagtctgatgaagttgcttgtattgttgtcttcattttgccaaagaggaaacaggcccagagggactgagttactcacctatggtgacagtggcttagcacttagcaaacaaactgatataggacccttggaaagttggaggtctgtgttatgcattagcaaaatgtttgataaaactacagcccactgtagcttgg

SEQ ID NO: 686 - DNA, 401 bp, Artificial sequence
  /note="Description of artificial sequence: rs729347"
gctgagcaccgtccctcctgctcatggatgattggaggcccaaaggttgttttatagctggaactgtccaaagggctggctcccggttccttggcaatacaattctttacatagttagtgtctaacctacttgccctggtcagctttgtgggccagtggccacgctcacgcacgtgccaagtcttttcctagatccagttcttaggtctaatatgttttgcctgttcatcctccatgtctctccctttctactcaatggctagcttgaggctatttggaacaataaataggaggcccacctttaacctgatgcttgtcctgagtaactgcatccaagagaaaagttttaccaggcttttcttgcccagatgagtcttatatctcatctcttcctatttggg

SEQ ID NO: 687 - DNA, 401 bp, Artificial sequence
  /note="Description of artificial sequence: rs896829"
  misc_feature (268)..(268): n is a, c, g, or t
caacttccttaacttctccgagcctgtttccttggctgtatgatgaggtcacagtagaactttaagagacttaggcttggaatacagaaaagacaatatttacatgcttagcacacagcctggcatagagaaagcactcaagaaatgtttatgattatcattgcattttcctgccttccttgcagttagataagggccacatggctggttctgtgggtggaattgagcagtgccactcccagtctgagtagttagaggtgggtgtganttttccattctctgtgggtagaaatcacacttgggatggaagaaccaaaagatggaagcaggctggatctctgagtcactgcatggagtcagctgccctggagctgcttttcctgcagcacactgggatgtga

SEQ ID NO: 688 - DNA, 401 bp, Artificial sequence
  /note="Description of artificial sequence: rs748902"
tctgctctgtgacttgcagtgattaaggcaggagagctgcccaggactggggccccccttccgaaagtgctttgggggttctattcactgagctgtgtcattaccaggaactgaaatagcccaagtctaatggctaagtcccatctctctctctttcgtaaaaggaaatgattcccctgatgaccggattgctttccctcacagcctcccacaatcctggcctcacttgtggttcatttctcccctcagtgggcatttcctggaagactctatcctgtgtatctgatggctgttctgttcctgcctgttctgttcttttactgtctcctctgggtgaacttgttgatctcacacaaggtttaaaaattcatgactcgcggggaagatgaaatgagatgagg

SEQ ID NO: 689 - DNA, 401 bp, Artificial sequence
  /note="Description of artificial sequence: rs730338"
  misc_feature (221)..(221): n is a, c, g, or t
ctgggacgcagcataaaggggatcatggcagagaagagctgactgggaggacatcaagtctgtgaggccctgtcttccctgcgatggggaagagcatggagccctggattcgtgcaaccacctttctgtctagtcctgggagtgggggctgccctgcttcatgggctcagctgtgtgagcaccaaggagtgatgggtgacataatgaccgtgggggcgcangttgggtccagggcgtggtctgcaggcaggcctgtcatcgattttgcccatttccagtttctctgctctgtgacttgcagtgattaaggcaggagagctgcccaggactggggccccccttccgaaagtgctttgggggttctattcactgagctgtgtcattaccaggaactgaaatag

SEQ ID NO: 690 - DNA, 401 bp, Artificial sequence
  /note="Description of artificial sequence: rs698028"
  misc_feature (393)..(393): n is a, c, g, or t
gggaagctgagtcagagtgcagttcttcacccaatcccacagccacacgtgcctgcttgctcacgggatcttcccactctcctcgggaaggcttccgagctgcttcctcaggatgtcctgtgatagcagcctgacctgtcaaagccatgcgaataccatctgttcagttatataacttgagatctgggaagaattctcaacgtaggatttgctgcccaaatcaaatcattttcagaaaggagattaagcattctttgctgggaaaaggagaaattaccagaaaaaattatcatttcactgagtataaacaaacctttgtccaaaatacacaaatgaaaatgacaaatttgcttcattaatatttgcttgcattaaaaatatacacagggctangtatggtt

SEQ ID NO: 691 - DNA, 401 bp, Artificial sequence
  /note="Description of artificial sequence: rs9804181"
  misc_feature (151)..(151): n is a, c, g, or t
  misc_feature (392)..(392): n is a, c, g, or t
ttaaatgcagtaggggagcttactatttaaggcaactgaagtaacttctatcataaatatttacctcctaatttctttttctttttaaagctgaatttccacatgttggtttacagacactattttaaacaagtctatacaagaaaatgangttttataaccatgctaagcatgtttaaagtagttatagaaatccaaaaactttctgaatctatgtaaactatgattatgaaacatcagaaaacaaaataagctaaagttcccttctataaaatgaaaaagttggtttagttcttctcctctagcatagttactctctgattccataagtttcttcacaatcatacatgcattgtatttattttctctggctatatctggttacaagcagnaattcattt

SEQ ID NO: 692 - DNA, 401 bp, Artificial sequence; identical to SEQ ID NO: 13
  /note="Description of artificial sequence: rs9949324"
  misc_feature (48)..(48): n is a, c, g, or t
  misc_feature (99)..(99): n is a, c, g, or t
  misc_feature (401)..(401): n is a, c, g, or t

SEQ ID NO: 693 - DNA, 401 bp, Artificial sequence
  /note="Description of artificial sequence: rs9949519"
  misc_feature (1)..(1): n is a, c, g, or t
nctcacttcaatctattctaaaaataaaggacttgtcaggcctaatgataagggagagttttagggaaataaagagagctgaactgacacagacataataatgtcaagatataaatcacagagtccttctgccattttcattatctgcctcggaggattacggtgcttgctataaatgagacgctatggggactctgcccatatataccagtctagatgcagggtcaacagtgggcaagttttgcttaaatcccagcaggcattctatattttagttttgggcattttgaaaaattgcatttgttgtattaatatctatctatttatctatctattttcttttaggaaagacaaacggactcaaattagagtaacaatgaatcaaattagaggaaaaatga

SEQ ID NO: 694 - DNA, 401 bp, Artificial sequence
  /note="Description of artificial sequence: rs611509"
  misc_feature (73)..(73): n is a, c, g, or t
  misc_feature (120)..(120): n is a, c, g, or t
  misc_feature (176)..(176): n is a, c, g, or t
  misc_feature (326)..(326): n is a, c, g, or t
  misc_feature (364)..(364): n is a, c, g, or t
  misc_feature (397)..(397): n is a, c, g, or t
cgtgatacttatttaaaagcatctttgaaatcttttgacaaatgaccggtgataaaaacattaagaaatattnttgatattggtgtatcgtattatttttccaggggattccagagtggncggacctcatggaaattcagtctgtgtcctatgtcttttaaaatttgcatttaaangatttctgaatatatttttaaatgattttaagaagtcaagagataagcattgctttggtgaaagttgtcttcactgttgaattagctaaaagttttgatatcataatttaaacaaactgtttttgtattcagctccatagctttgataanaaagagtaacagcttctgatagaaatgagcgatccagnccttgaaaggcagcagcacgcagaggtggttgnacat

SEQ ID NO: 695 - DNA, 401 bp, Artificial sequence
  /note="Description of artificial sequence: rs592612"
  misc_feature (199)..(199): n is a, c, g, or t
  misc_feature (210)..(210): n is a, c, g, or t
  misc_feature (357)..(357): n is a, c, g, or t
ttgcccatgtataaaggctaaatcccacgcaccccaataaaacagaggccacgctctttccctcagggtgactttgcccttcctagacctcatgtcttcaggtgctgatttcattgaaaggcaccctccacctgagtggttattagagtgtggcacaccgggctgccccttggttgtggctagttatgacctgcattgnaagatggcagngaggagtaaacatctgtccttaaaacgaggaaatgagggaaaaacaccaggtgaccagcagttggttgtacacggcgtcagcaacacggggcttgatacagctccatgcgtggcacatcgcaagcacctgagaaacggcagcgcccntgccaggaccgtttctagctctacacaatttcccagattcatca

SEQ ID NO: 696 - DNA, 401 bp, Artificial sequence
  /note="Description of artificial sequence: rs603942"
  misc_feature (110)..(110): n is a, c, g, or t
  misc_feature (172)..(172): n is a, c, g, or t
  misc_feature (245)..(245): n is a, c, g, or t
  misc_feature (325)..(325): n is a, c, g, or t
ggaaaaacaccaggtgaccagcagttggttgtacacggcgtcagcaacacggggcttgatacagctccatgcgtggcacatcgcaagcacctgagaaacggcagcgcccntgccaggaccgtttctagctctacacaatttcccagattcatcacccagttctcaacacagntcttgtttcacaagatcaacaagtgtgaattttgtcttccatggaaggtaccatttgtgacttgactttcccntatcttgcttctccttggacttgtatcaagagagatttacagaatgattgatttgaattgttgccaaggttggtggaagntcctttcataactgcctggatgggtggcctcattctgaccttctcctttgccaccctctcaccgccctccacagac

SEQ ID NO: 697 - DNA, 401 bp, Artificial sequence; identical to SEQ ID NO: 63
  /note="Description of artificial sequence: rs618670"
  misc_feature (30)..(30): n is a, c, g, or t
  misc_feature (70)..(70): n is a, c, g, or t
  misc_feature (292)..(292): n is a, c, g, or t

SEQ ID NO: 698 - DNA, 401 bp, Artificial sequence
  /note="Description of artificial sequence: rs677233"
  misc_feature (327)..(327): n is a, c, g, or t
tatgttggtcaggctggtcttgaactcctgacctcaggtgatacacccgtctctgccttccaaagtgtttagattacaggcatgagccaccacgcatggcctaaactttcaagtttagaggcagaaaagatttcttgctgtctgcaaccaaggaatgcatagacctgcacacacactggaaaaggtgtacaataagggaacgcacacaggggagggaacgcacgtggatcgttactcttctcacaaccacggctcttccctgcctgtaagtgcatgcatgtgacttattaacaaaatgtaattgtttgtgattcggaggctcctggnttcaaatcgccttgtgtctttgttcttgtgttttatactacttgggaggattttgggttttttcttcccagtct

SEQ ID NO: 699 - DNA, 401 bp, Artificial sequence
  /note="Description of artificial sequence: rs7506508"
ccaggtcctgtctctaataaataaataaattacataatcttaggcaccagtcactccaggaggcacagaaaatacactatcatctctgccatattggatttatcatctagcacagaggaaaacactaggtggttggtccaacccagacaaggacctatggccacacttccagctcccggaggacgatgccagcagcgttgcgggtggagacgccttcccagctgccgggccgcacagctgcagagccaaggctccaatgcagagctttctgagttgaaagtctttgttgtcatctcacctcatagaaataatagctcaattatcactctaagccacaccataatacacttccattaaaaaatcaaaatcagtgatacatttaaaatgacgctttcagctgg

SEQ ID NO: 700 - DNA, 401 bp, Artificial sequence
  /note="Description of artificial sequence: rs9952440"
  misc_feature (35)..(35): n is a, c, g, or t
  misc_feature (243)..(243): n is a, c, g, or t
cagggagatagacacacacggatatgcacacaaanacacagatacacagatacagacacacagatacatgcacacagaagcagacagacacacagatactcagatagatacacatactcgtagatacacacatgcacacagataaacacacagatacacatgtgcacacagaaatacacacagatacacacatgaacacacggagataattatatacacagatacatctacatgcacacacanagatacatacacacaagcacacagggatagacacagatacacacacagatacacgagcacaaacagatacacaaaaatataggcacagatacacatacacacaggtacctatgtgtacatacagaaacacacacttgcacgtagagacagacacacac

SEQ ID NO: 701 - DNA, 401 bp, Artificial sequence
  /note="Description of artificial sequence: rs649867"
tgtggggtgtccctgtgtctccggggtgacttgggcctccagagaacccctggcacaacctccagctgaaaacaggaacaaagaaagtgagcttaacattccggctgtttcagacaatgtgtttctctttgtgggggcaaggagggcagggagacacctgaaaccatttttattcatcagctcaagttggtgggtggcagagtcatgttgagggaaaaaagccaaactctgtaaaatatttagagaggtttcttctgagccaaatatgagtggtcaaggcccgaggcacagtctcaagaggtcctgagaacatgcgcccaggttggcttcagacatttagggggacaaaagttacaggcagacgccaatcagtacatgtgaggtgtgcgtggggttggtct

SEQ ID NO: 702 - DNA, 401 bp, Artificial sequence
  /note="Description of artificial sequence: rs8098133"
  misc_feature (28)..(28): n is a, c, g, or t
  misc_feature (311)..(311): n is a, c, g, or t
atttccctgtcttaacaaaatgaaaganaaaaaccatatggtcatctcaacagaggcagacaaccatttgatattattctaaaacagtcataaaaatcttttagaagactagggatgaactgaagtttctttaacctgagaaaagacaggccagaaaaacccttagcataaatctttcctgatggagaaatgtcggaaacattccctttaccatctggaataagacaaggagacccactataactgattctgttaatcactgcactatggggctaaactacccacagcaatgcaagaaaagaaagaaaagntacaaaacttggaagggaagcataaaacaatcatcattcataaatgatatgtgtttttaccatggaaactgcaaataatctaccgatata

SEQ ID NO: 703 - DNA, 401 bp, Artificial sequence
  /note="Description of artificial sequence: rs898619"
  misc_feature (314)..(314): n is a, c, g, or t
aagctgtgctgggaacacagtgaggcccttggtttcccagcggcagatgcagacgcctcccttgggccccatacgagtcacactcaatgggtttccctggaggcagtccttcctgctctgtgaccccagcctcatgccattctcaggtgtggtgggggggcatgctggagggccgagacctgttttctcctgactgaagacgcagatcgctgagtgcctggagcagcccctccctctgggccgctgagcgccccatgctgggggctgctttacctctaatgccaagtgggaggtgcggcagctactttttctgngttttcatggttgagggcctgtttctgcttctgtgtgactttgcagtttgttttcatgaaggactatggctctgtgtgttcatgagt

SEQ ID NO: 704 - DNA, 401 bp, Artificial sequence
  /note="Description of artificial sequence: rs8087647"
cagggctcctggggaactcagcgactggactttcgggcccagaacccaggagggcaggcgtagggacgggatggcatcagggaggtggcagtcgaaaggacccgagtgggcagaggaatgtgaatagccccaccccacgcacaagctcagcagctctgcggggccactggtttagcggcagttcttgacatcagcgtcagcatctgaggttgataattttcttaggagcttgcttgtgttaatcctactaataatttacaaaatcctaagtcacttgactattatgcccatatttttgccttttgccatttcttcctttccatcagctccagagccccttcctgtcagctcctctgagcctttttgacagggcaggccgctccccgcccctccgcaaagac

SEQ ID NO: 705 - DNA, 401 bp, Artificial sequence
  /note="Description of artificial sequence: rs8084175"
  misc_feature (58)..(58): n is a, c, g, or t
  misc_feature (65)..(65): n is a, c, g, or t
ggtgcagccgggtgagggccctggtggggtacagctgggtgagggccctgagccctgnaggggtncagtcaggtgaaggccctggtgggatgcagccgagtgagggccctgagccctggtggggtacagccaggtgagggccctggtgggtgcagccggatgtgggccctgagcctccagtgctggccggaacagcctgacgcagccgggtctcctgcaggcacagagaaggtgctgcaggcacaggagtgcggacacctgcacgtggtcaaccctgactggctgtggagctgcctggagcgctgggacaaggtggaggagcagctcttcccgctcagggacgatcacaccaaggcacagaggtgggtcctcgctgcacccagcaggtccgtgccaggcgt

SEQ ID NO: 706 - DNA, 401 bp, Artificial sequence
  /note="Description of artificial sequence: rs9953991"
  misc_feature (70)..(70): n is a, c, g, or t
ttacaagcatgagccaccgtgctgacctgtgaaatgattttaatttcagcccactgacgtctgttttgtnacttggccgttttttgtgtctgttttcgtagcctggagatgttgcattttcttgttttgtgttttgccgtgtagctctccggaccctattttgagggtgaatgacatgtcctgggggttcccagaacacgcttcatctcccgtctctctttgccctttattctaagatgccagagcctggcagatgctctctgccccacgggggttttgtggataaaagaagatgggtgttatttttccacaggatagtcagaaacgtgttttgccagtcaccctggctcagttagcaaattctgatccattaacctctgaaaagtgtattggcgaaacat

SEQ ID NO: 707 - DNA, 401 bp, Artificial sequence
  /note="Description of artificial sequence: rs9946977"
  misc_feature (209)..(209): n is a, c, g, or t
gcaaggggtccccggttcctggaggagcagcgggattgccccaggctctgggatcgcccacgggggcagcgggccagcacccccagccgcatctctgcacagccgtgctgcacaccttctccgtcacgtgttggaggtgggtctcagcaccagcacatccacattgatagcttaaaatgggacttttctcccgcctgtctcactgttgncccgcccccatgcagcggtggggaccccactgcagggactccaagagccccatcctgtcctcggctccagcctccatcagcaccagccgtgtccttgcagccctgactggagcaactcccaaactctgctgcccggcaggtcttctgaccctgcccgcggtgatggcaccctctggaaggctggcccaggac

SEQ ID NO: 708 - DNA, 401 bp, Artificial sequence
  /note="Description of artificial sequence: rs554659"
  misc_feature (322)..(322): n is a, c, g, or t
cggtcgtcgccttctgtctgtctcagggtgcagcagaactcatcactgcactttcccgactcttccaaagatctcgaggttgctggagaattgtgctttttaaagaaagtgcctcttaattgtccttgacaaatacataacccaaccacagggatgtttatctctggccaaggcagctcatctgtaagtcattctgtcagctcgggctgagccagtttctgactttcagacaactgcctttccaggcctccttgggaaagcactgcttagagctcagcctccagctgctgacagcgtcttcgttatccccggcaggtgtcangagctgactgttcacggggcgctcactgacatctttccttccttcttcactgcaaaatgttaaaaatgaatctttagaa

SEQ ID NO: 709 - DNA, 401 bp, Artificial sequence
  /note="Description of artificial sequence: rs551017"
attcccagcgtgcacactggtgagttccatgagggccgcagggtccgggcctgggaggggtgtcctggggtctcagctcgggcagcacagggccctcctggggcgggtcaggctccttttccggacctgtgcctccctcaagcacgagaggccccgctgcaggcaccctgctgctctaggcctgggaagtgcaggagaggcgggtacagctttcagcctaattgagctctcacctgaaaagaaacagcagcgttggcgccaggtgtcaaggcaacgcatgcagcagactcacgccttcgatgatcaaaatgcatcttccgggaactgcctggaatgaagggaggtttgaggtgacatctgaatgactttcaaggcattttctgtccggtcgtcgccttctg

SEQ ID NO: 710 - DNA, 401 bp, Artificial sequence
  /note="Description of artificial sequence: rs665138"
  misc_feature (15)..(15): n is a, c, g, or t
  misc_feature (181)..(181): n is a, c, g, or t
  misc_feature (266)..(266): n is a, c, g, or t
  misc_feature (338)..(338): n is a, c, g, or t
gtccctcaagggagnttccctcatctaaaaacatgattcaacacagtgagcgattttcagttgtggggttcctagcagtgtctaacaagccattctggagtccatcaacattttttttttttttaataaaaaaggtgagatggaattaaggctggaagtggcggactttgggagaaacatnccaggagtctggcctcctgcgatgagcagagctctcctggtgggcagagcaaggatgggaaacagctggaaggagaaggactgcnggtgggaggcatggacgggaggaggaacatgggagaaacaaagcttgtgcaagcacttcttatgggtgggcnacgggagcagaagaggaggctgggctgcgctcttctctccaggagcccaggctgcagtggacc

SEQ ID NO: 711 - DNA, 401 bp, Artificial sequence
  /note="Description of artificial sequence: rs652717"
  misc_feature (75)..(75): n is a, c, g, or t
  misc_feature (83)..(83): n is a, c, g, or t
  misc_feature (386)..(386): n is a, c, g, or t
ccttacatagatcaaacctgcttgtctcagcttctgtgacgatcaagcatccgacacctgccactgtggtttgcngttttccngcctctccctagtggtgttctgtgatctttattattcaagttatctatcattttatctggggaattagttgagatctaagttgtgttcctttagaaaggatgtgtgctcacttctgccggccactgaggacgcccccgtcaaccccattatccacttgaggtttctcagattatgcacatggcataaatctcggcttaggaaccagcttgttgtcactaattctcagaggacttttccccttcctttgcccaagctgaggccaaaacaggcaatttcccttactcatgtccttggcgtgaagngcctcgtccttgttc

SEQ ID NO: 712 - DNA, 401 bp, Artificial sequence
  /note="Description of artificial sequence: rs576937"
aggctgcattgccacaagttttgaaatgtagttcaaatgcggttcacacagatgtctgttcagtttccactgtgactgattcttggctcacgagttaatataaatttccaaatgtgagaggtttttctagttaacatttcattggtttctaaacgatcagaaaactctggaaataccctatatatgtccattacaccaaacttgtgtattatggtggtcatttttctgtattctttctgatttgtgtgtgtcttatcaattattgaaagaggtattaaaatctcccaaaatgctgctgaatttgtcaatttctttttatggtctcatcagattttgctcataacagcacagctctaatatgtgtaggtaccttttatttttggatctctgttattagcgat

SEQ ID NO: 713 - DNA, 401 bp, Artificial sequence
  /note="Description of artificial sequence: rs621490"
  misc_feature (281)..(282): n is a, c, g, or t
cacctccggtccacgtcggggctggccaagactgattggtgtgcagtgtccctgtgggagccgcctcacctgggtcccacacaccctggctccatgtcagactctgcctggaatggacgcaggagcagagtggccgccagcttggggatggcgcgcaccttcagccaggaagaaagcctttgcggtgggaagccactggcattctgggatcgctcgttactgcagcgcagcttagcgaaagctgactatggcttctccactgaaaacctgacatttgtaannaaacgggattcacttggatgacacctttaagatacgaagtctatccatgaccatgccactctccagttaagatgttagtactttcagtaaacctgtagaattttctcaaagaactttca

SEQ ID NO: 714 - DNA, 401 bp, Artificial sequence; identical to SEQ ID NO: 15
  /note="Description of artificial sequence: rs7704939"

SEQ ID NO: 715 - DNA, 401 bp, Artificial sequence
  /note="Description of artificial sequence: rs9671273"
  misc_feature (81)..(81): n is a, c, g, or t
  misc_feature (241)..(241): n is a, c, g, or t
tcaaaaaaaggtggattcatggaaatagagtaaaatggtgattaccagaggctgggggtcctgggggtggagtgaaaaganagagatattggtcaaaggacacaaagttttagttagacaggaggaataagtttaaaagatctgtagtacaccatggtcactatactgaatacaatatattgtgtacttcaaaattgctaagagaagattttaggtgttctgaacacaaaaatagtatgcnaaataatgtatgttgatttagccattgcataatgtatacatatatcaaaatgtcatgttgtatgacataaatacatataatttttacttgttaattaaaaaataaaagtttaaaaaattgtagctgtgcctaacatcatacccagtgttgagagaccgga

SEQ ID NO: 716 - DNA, 401 bp, Artificial sequence
  /note="Description of artificial sequence: rs7359138"
tcataaagattacgttctagttgataaaattagttctcatgagtattgactgagttaacaattctgatattgttatgcacatataccagaaattaacaagtaagtaaatgaatggtagatggtgggaaccaagtttcttgctgctgtattggaaggttacagacaagcaagagaaggagactacaatgatgtatgtgataatgcattacagttggaagcatcagtatatactcatgtttagcttaatatatacacagatatttacacagaaacatatttgtaagtatgtgcatatgcacatatttaagcatacacatattttttagcatacacatattttttcttactctttcagatgaggagtcctaaaaacaaggacatccaagtagcaataagctcat

SEQ ID NO: 717 - DNA, 401 bp, Artificial sequence
  /note="Description of artificial sequence: rs8010141"
  misc_feature (222)..(222): n is a, c, g, or t
  misc_feature (346)..(346): n is a, c, g, or t
ccttgagtctgttgtacttagagtttaacaattaaattgaaaaattctgtttttcttttctctttccatgagactccaaatcaggacagggattgggtgaaaggaaaataatacttctatttatgcattcaaccattcaataacatttattgagtatctaccgtgaaccaagcactattctagatgggactgggggtcagagagaaagatacagaggcaaanaaaagagactaaaatgccttctcttatgaaatttagatgttaatgtatgagacgtgaaaaaagaaactaaaaataaaaaagtaataaaacttgtattagatcaggatgggagcatgcgtactangcagacacatcaggaactgtgctatgactatcaggagtctacttttacatacggg

SEQ ID NO: 718 - DNA, 401 bp, Artificial sequence
  /note="Description of artificial sequence: rs9323737"
tattccttctcatccaaaatttggttatttaaaatctcactatttgaactcatgaatcaacatgtttggatatgtttccacataaaataactcactacttgctatttcaagttcagggtaaattttttaaaagtgtaaacgatatcctacacctctttattcaaatttactatctaaacttgtgctgtccaaattcaggaagtaggtagttgtgggtagcaaggaatacttaaagtggattgtagctcaagtcatacaatagcagcatttgttttcacgatccattaatatcatctctagtttacaaccatcaggagccttttcatagcaatgaactttcctgtgataactttgaaaaacaaaatctaaatttgtcatggcctacaatgcaatatatgaaa

SEQ ID NO: 719 - DNA, 401 bp, Artificial sequence
  /note="Description of artificial sequence: rs9323738"
  misc_feature (384)..(384): n is a, c, g, or t
gcccatccctgtaaatatttgttctgaattcacttgcttagtaatacaaagcaaataagtaatgtctaaaaatgtattcatggctttcaattgcatttattttacttgacattaactctaaattttgaaagaaaaatgctggatattgacagttgttagaaatctggtatcaaatagtactacccattctctaagggctactatcagatcattgcttatttgactagatgctgtgataatctgttttgacttaggtattgaatatacgcctaatgtctccattaaagtggtttttaatgtcatatatctataatctcagcgagcaatgatgagaacacaggaaactcctcagggagtttcaaatgaactattgtttatagattncagattgttctgatttt

SEQ ID NO: 720 - DNA, 401 bp, Artificial sequence
  /note="Description of artificial sequence: rs9323739"
  misc_feature (127)..(127): n is a, c, g, or t
ttgaatatacgcctaatgtctccattaaagtggtttttaatgtcatatatctataatctcagcgagcaatgatgagaacacaggaaactcctcagggagtttcaaatgaactattgtttatagattncagattgttctgattttgttttcaaggaagatttagctggggaatagagtgtcagcataaagaatatgcaaagcaatacaatagtatgatttatgcaaattaaactgtgcaatataatgagtaaagtcactttaggtgatattaaaaattaaaggcaaggcagacagtcctaaattaggcactatgctatattataaaagtagttgtataattatttttaaaactgaaaatggcagagaaatggaaaaatatactaacaaatttctgaagaagc

SEQ ID NO: 721 - DNA, 401 bp, Artificial sequence
  /note="Description of artificial sequence: rs877800"
tggaagcacagaattatgtgacaagttatgtgcttccaaaataaaatggtaacaaagggtagtagaaatattttcattctgaaaggaaagaaagaatgagtggtgggtctcacttgacaccaagaacaaaacctcacaaagtaaactgcatgggatctaaaactttgagaataatcctcatcggctcaatgctttactttccatgaacactggggtggcagtgtcacccccatggctctgcagtggttgcacccaagctgtggcaatgccaggtaggattttttccctcatggctttgggcagacccatccacatgatttgtgttgaacgcagttccacacaaatgtagattttctctgttgaaatctctgaatcacctttggggacattattttcctgtc

SEQ ID NO: 722 - DNA, 401 bp, Artificial sequence
  /note="Description of artificial sequence: rs7494095"
attctcctatttggttggatcacaatattatatcagaataattgttatttcattgataatgaatttcagtagtgttaagagagaaatggcaattttgaaagaagaaaagtttgtggttgcaatattaaagcaactgatattctgtttttcaaaatctgatgtgtttataaaccttgtctacaaaaatcacattggaataccttcttagcctatcaggatcccatttgaggtatggatgtctgagacatatacagaagaattcaatccagctggatttgtgcccatctctgattcctatagtcattctagagctcagcgaagagcagaagggactcttgagtacttaactgatccttgaagttttcttcaatttcccttccccattcacttcttggggaaat

SEQ ID NO: 723 - DNA, 401 bp, Artificial sequence
  /note="Description of artificial sequence: rs9323740"
cacactgtcattttattggaatgaatgagatgataatatttgtttacctatttaagaaattgtctcttttaagtttttaattggacaccacttttccctattgtacactcatcatcactccctccccaccaccagctttgaggctttatacagttgttgagacaaaggacacataggaccaatgggtatgaaatatagttcattactcatatagaaaacggcaaacatttcccccaaggaaaataaggcagtatcagtccatcgtgatacaagacaaatgaatttaaactttctgcatgctccaaggaagggagaaatctgactttcttattggcttcccaagaggtggagcaaaggggagaaggaaagggtgagatttgaaagctgtctttgatcaaaca

SEQ ID NO: 724 - DNA, 401 bp, Artificial sequence
  /note="Description of artificial sequence: rs7157077"
  misc_feature (28)..(28): n is a, c, g, or t
ataatccatcaacaggatgtgacggcancacgagataatcaataggaagttactataataattaatatacctagcaaaaagctgttaaatgaatataaaagaatttgtaggaataaattaagattttatgagtcagagattgtttcgaaaacatcagctttgtcctctatattcagaaaaatgtgcatgtataacatgatagtggcaatcctgtatacaacacaaggactcatttacccattttatcaagtccctaatgtcagctttcagttgcacccctgtgggtatgaatctaccatatattattaaactaagaaagagactgtctacacagacaaatcaaaataacagatttggacaactaacaagattagcaaggaaattatttaaggtatttccaa

SEQ ID NO: 725 - DNA, 401 bp, Artificial sequence
  /note="Description of artificial sequence: rs7185630"
  misc_feature (249)..(249): n is a, c, g, or t
  misc_feature (254)..(254): n is a, c, g, or t
tgcaagcagtgttacggccaggacccgcccagccgccaccagcagccagtgggccgtgactcggaaacgagcggccagccgtgacctccgtgtaggggccagcgttgctgcttcctgcagccctgccgtcgggctggcatccacatccctctcatcatcatcctgccaaggtcacggacaggggcaaggtcaggtgtatcacactgacgccacctctccagcccacacctgcccagccaggagcgtggnaggcngccacatccacagctgctcctctgagggccacaggacagcctccccgggcacaggccccagccgtccctgaggtctgcctgacaccttcctacttcctcactcaagctcacagttcctgcaggccttcctggtagcagctcccaccc

SEQ ID NO: 726 - DNA, 401 bp, Artificial sequence
  /note="Description of artificial sequence: rs6500497"
  misc_feature (259)..(259): n is a, c, g, or t
agggctcccggaggacaggaccttccagggcctccctgccccgaacccataggtgccaggcttctcactgctcacgacctccgtgccgggctcatacctgccgcgccagcccctcttcagcagagcacaagtctggcagcaggagggcaccagccaggggccccgcgcccccgcctctgtacagcagggtcaccgtggggagacatgagaacaccgacccagggaatgggctcctgccacacctgcctgggaacctggnctgtgagtcctgctcgctgcaccctctagcctgacgttgaagtaacctcgccagcggggccctctgtggcactgggcactcagggagagcacgtggcattggagaaggtattctgagtcctacagagagggacctgcggggc

SEQ ID NO: 727 - DNA, 401 bp, Artificial sequence
  /note="Description of artificial sequence: rs6500498"
  misc_feature (143)..(143): n is a, c, g, or t
ggcttctcactgctcacgacctccgtgccgggctcatacctgccgcgccagcccctcttcagcagagcacaagtctggcagcaggagggcaccagccaggggccccgcgcccccgcctctgtacagcagggtcaccgtggggngacatgagaacaccgacccagggaatgggctcctgccacacctgcctgggaacctggcctgtgagtcctgctcgctgcaccctctagcctgacgttgaagtaacctcgccagcggggccctctgtggcactgggcactcagggagagcacgtggcattggagaaggtattctgagtcctacagagagggacctgcggggcctgccccacaggcacgtggggctcctgctggggctgtcaaggacccccgggcactgag

SEQ ID NO: 728 - DNA, 401 bp, Artificial sequence
  /note="Description of artificial sequence: rs7338831"
aaacattggtttaatgatcaaatcttctatttgtctccctgtgctgcctgccctcccccaagacagtgaaggtattgtctggaaaacactgaagaaaaacttttcattctgaaacaactaaggtttaaggcaaaagtattcagacatctttgactatcaaaattacatcctagataaaccctaagacagttgataaaatgaaggcgtgacatgtatcagatacagctttagagtatagatgtactcttacacagagatctaaaagtaaaacatatgactggaaagggactgtataagtaaataatacaaccatgcttagaattcttgaggacgatcaagtgagtggtttaaatatttactttactcagctttttcttgagcttgagcaaatcagtaatact

SEQ ID NO: 729 - DNA, 401 bp, Artificial sequence
  /note="Description of artificial sequence: rs9561295"
  misc_feature (379)..(379): n is a, c, g, or t
tcagaataaagaaccaagacttgctgactaccatggcagaccattaattaactcctttagttacttacagtaatcataactaataaactatatgacattacatcttaagttttatagattctggagtcaagtttgttttgtgctgtgctgatgggattatagtcatttattgaatatcaagaggtagttaatttttttttcgcttgtattagggaaaaataagctgtagttttttacttgatatgaattcttcatttgataatggggtaaattggattgtataaactagaccactttggggcatattatttctgaaatgtgactagtttgaataagataattatagttcagtggtaattttaatgacttagctttgggnatatgtaagttgtctttagatg

SEQ ID NO: 730 - DNA, 401 bp, Artificial sequence; identical to SEQ ID NO: 27
  /note="Description of artificial sequence: rs9589698"

SEQ ID NO: 731 - DNA, 401 bp, Artificial sequence
  /note="Description of artificial sequence: rs9523990"
ccagaaatggagtcattacatggtttctttgggagaaagggaaccccagggagggaaatttttcctcaaaattgtctccctgttacatttcctataagccctctgccgattcctaaatgaatcattttcttcttattattacattacttatgatgtgttgcaaataattttaccgtgggtgaaggaatttacgaacacaccactgaggtgaaaagaaagtcctgggtttagtgctggttttacaagtaatttagactggtgaccattactcaatcaatttaatctccctctgtctcagcatcacatctataaaacgatgaagacaatatctgccaacctaattaagagttgtaaggatcaagtgaaataatgtcaaggaaagtgctttataaattgccaga

SEQ ID NO: 732 - DNA, 401 bp, Artificial sequence
  /note="Description of artificial sequence: rs9523991"
tcatcagactaaaccaaggtgtctttattataacccaattcctcaaatccccatctgagcttgaatttgaaatgctcagagatttctagagactgaaaaatgagtttaagctactctgtggacaaagacagtggttaaactgtttttttcacattcaatttagtaattaactttttaaaaatagaataattgttcaactaaacataactttattgtggtaaatatcttttcaatgtactataagttttctaagggcaggaatcacatttctttagaagctgagtgcctagaactcaatagaagctttttgaataaatgatgggagaaattttcttttattgaaattaagggtttttatgtttgctttcctaccataaaattagagtttagtcccttgatgc

SEQ ID NO: 733 - DNA, 401 bp, Artificial sequence
  /note="Description of artificial sequence: rs9523998"
  misc_feature (273)..(273): n is a, c, g, or t
cttgaagaacttatcatcacttcaacccattcaaaagatatgagagaggagatgtgcaattgagtaatgattaggaatgtagcacatattgcatttataaaacacatcaaactatttttcaaatattagaaggtgtaattgagtctgcaacacattttactaaagatatttcctttaatttttaaaaccatgtgtattacagggggaaatgagatccatatgtttgattcttgcacagttaaatgatatattaaaggattatttgcaaatgcnttagaagtttattgtcaattaaaataatctacttttaaggaaattatgttttttttaaaggttttttttgttgtaatttgaattttggtccaatatccctgtagggaaaactgtttaataatagcaag

SEQ ID NO: 734 - DNA, 401 bp, Artificial sequence
  /note="Description of artificial sequence: rs9561304"
  misc_feature (97)..(97): n is a, c, g, or t
  misc_feature (315)..(315): n is a, c, g, or t
  misc_feature (400)..(400): n is a, c, g, or t
aaatgtaatctattctataatggcattaggtgataatgaaagcagatattagagacataaccattttcatatttaatagagaagcaatgtgttctangtaatgaagttaagacttcacatgacattgtcagcacatgttaactctatgttttggaaggctgctttttagacctaagtaaatataattcaaaatgcccctacacttgtttatctattagatgctcttgttttgttttacacatcataactgccaggatcatttatttggcagagcctcagaataaaaacaactcaaaccaaccaaacaaacaacanctaagaactaataaaatctttgaagcttgaaactgtagaaatgaggtaaattttttttttccttggataactacttccaatctant

SEQ ID NO: 735 - DNA, 401 bp, Artificial sequence
  /note="Description of artificial sequence: rs956036"
  misc_feature (27)..(27): n is a, c, g, or t
cagcttattcgagactcttctccctcngtccatagccaaggaaattataggaagcattctagtttgttgaatggttcataaatatgtgacagttttttttgttggttggttggcttttgttgtttgatactaatggaccaagaagaaaaaaaaagcaaatttttattttgaataatgagggtgaatgagtaatatgagtaatatagttcttttctgtaacaaatttcagataacttgatttaattgggaataacatgttttctaacatagaaaaaagaatattgagactccagttcaacatggtaacatgagcaaatatgtttatctctataccctcctgaatatctcactaaggctaaaataaaggggaaaaaaggatagaaacatacatgaataaagag

SEQ ID NO: 736 - DNA, 401 bp, Artificial sequence
  /note="Description of artificial sequence: rs768056"
cagttcaacatcctggacaccagaattctcccagccttcttacatgagcctaaatcctcccttcaaacagaagaaggaacggagctgcggtgatttgaaaggaagatccatagctctctctttgttggtggaaggcaagaaacagaaacagctgcttctactctgctgctgacgtgacctccttcccctttcattcccttacagactggtctttttggttttctccagccattactggtgtgcgtcactggggcctcccttcttccagcacattggtctcactgccctcatctgttctctatcatcaaagcttgtctgaccctgaccctcagcctgggtggagagtagggacccccacacctgcccactgtacttgttgactagtcagacccaaagtgaca

SEQ ID NO: 737 - DNA, 401 bp, Artificial sequence
  /note="Description of artificial sequence: rs7855644"
  misc_feature (374)..(374): n is a, c, g, or t
caatggatccaaaccaagaagaaatccctgaattacctgaaaaagaattcagggggttagttattaacccaattagggaggaaccagagaaacgtgaagcccagtgtaaggaaatccaaaaaaatgatacaagaagcgatgggagaaatattcaatgaaatagacagtttaaaggaaaaaaaataaaatgtcaggaaactctggacacacttttagaaatgcaaaatgctctagaaagtctcagcaatagaattaaacaagtagaagaaagaaattcagagcttgaagaattaacccaatccaacaaagacaaagaaaaaagaataagaaaatatgaataaagcctccaagaagtctgggatgatgttaaacancaaaacctaaggataatcaggttcatg

SEQ ID NO: 738 - DNA, 401 bp, Artificial sequence
  /note="Description of artificial sequence: rs9409427"
agtggtttatcaattctgttgatctttccaaagaatgaattttttatttcattgatgtttctgtattggtctttttaaaaattgacttttttctggtctgattttcattattgccttttttctttttctacttactcttgctttaattcactcctttttctagggttttggttttttatgttttgttttagtctggacacaacaatgaagcaggatatttccctgacctctctgtgggtgggaactggagtgcacgggcactggaactagccactacttcagcaccgacagggcaaactccacttgcttgaacctgctgcgttccacccctcgtgggagggggacttcaggtgagcaggtgctggagccaggacgagcacttgtgggctctggcaggagca

SEQ ID NO: 739 - DNA, 401 bp, Artificial sequence
  /note="Description of artificial sequence: rs902923"
  misc_feature (12)..(12): n is a, c, g, or t
  misc_feature (83)..(83): n is a, c, g, or t
  misc_feature (374)..(374): n is a, c, g, or t
aatgaaatgcanatgtagtagccagaatttgagcagtcgttttgatcatgaggtggaagcaatgtgcagaagatgatgggganaaaaaggaatttcaacagatttttgggagagaaaaatcagatgatacaactggtttagaagggggaagaaatttacaatccatggtgcctgtagagattgaggctaatgggaagagaatgttctgccttgcagaacttgtgaaatgctcaggaatttgaggcagtacatacagtggtcagctggattaatgagggctggctggagactgtggaacagtcagactctagaacaccttcaccctccacactcaggcaagtcactcctccaggtcctccaaccactgcccctanagatgagatgagtattattcactggag

SEQ ID NO: 740 - DNA, 401 bp, Artificial sequence
  /note="Description of artificial sequence: rs9452447"
tctgacacttcactccaggaagccttcctacattgacttattcctcatccttgccagcctcctatatttgctctatataactgtgaatcttccttccccactttcccaaatgtggatgttttgtttacttggcttcacctaatacgtttttgactaattttttatgaagggaaaagaagagaaagaagcagaaggaaataaaaaaagaggaaaatataaattggcaatattttacttcatactagatactgtcaacattacgctatgaaaactctgggtttggttttcttcctctgaagagcattggttttgttgtaccagacacttagtactggctgaccacactaaacttgtaggtttgggttgatgctttttatagggaagtgtctttaagttttgct

SEQ ID NO: 741 - DNA, 401 bp, Artificial sequence
  /note="Description of artificial sequence: rs9294577"
tgaaataggaaacaattacttattaatgcatgaaaacaaaaatatgtatgacagctgactaatcatcacaaatcatgctttacagatgataatggagtcaagtctttaaattattgaaaaaagaaatcaacaacttagaattccatatccagaaaaatatctttcaaaaatatgagtaaaagaaagctttttacagacaaccaaaagctgaaagaatttactgtcagcatataagcacaaaagtatcaaaggaggttattcaggtagaatcataataataacatttggaaatctggatctgtgcaaatgtagagcacctcaaatgccaatgaaaaaaattttaaatgctttttttattatattaaatcttttaaaaatataattgacaagcctggcatggt

SEQ ID NO: 742 - DNA, 401 bp, Artificial sequence
  /note="Description of artificial sequence: rs6904831"
  misc_feature (29)..(29): n is a, c, g, or t
  misc_feature (282)..(282): n is a, c, g, or t
  misc_feature (388)..(388): n is a, c, g, or t
tgctaacagatttgaccaaactttactcnggtttccacctgttctaggtcattctcctaaaggtgactccagtcctgtgctgagtcctgtgcattctcctaaaggtgactctagtcctgtgctcaataaaatgcaatgctgccaaactgcaaattgtcaattgtccttaccgactttgtcaaaacatttttaataattgtccatttgaccccttcttgtaattcctgatatctccagatcccccagtccattttgttcttccttttttaccttcccattgtntctttttcttcttttttttttctcttgaaaaacttcaagtgcgggtataaattagttcagccattttagacagcagttaggagatttctcaaacaactaaaagaantatcatttaaccc

SEQ ID NO: 743 - DNA, 401 bp, Artificial sequence
  /note="Description of artificial sequence: rs7765999"
atggtaatgaacatgcaagcaaagaacatatattcagttcataaagcttttagcacttgttagcttcatagtagtaacagaagaaaaatacgttaactggtgtgtttggcttttctcatgatttctgtaactgcactaccatagtactagtagctttatatgtttgatgactttcataacttatttgtcaactacctaacaagcaaattttgggaaatgttgtagagaatacatacaaataatataactcatatatcagttggcaggtacagttcaatattaaacagatatataagcctataatggataagggtaagatacatcctggcttaaaatgcagttatgagagctatcagattatagctggggtgcttgggatagttggaatagagattctgata

SEQ ID NO: 744 - DNA, 401 bp, Artificial sequence
  /note="Description of artificial sequence: rs6925802"
tgctttgtcagacagttcagttttttcaccaaatagctgtaactttaacaccaagtgcagggaaactttcactgctcttccaggaatatccatctgtgtcctatggacctgcttctgcctatcgcttgtaactgccaccaaagcacttgtggtgccaacatagtgtgacaactatatcaaagggagtatagcaaggaaaaaaagaaagctttaatccccttaatgtcagatcccactagagggtcccaaagcagttctgcttgtgatccaagattttacagaaatgttctttcggttttttttttttttccttatagccattttcatttcaaagatctaaattcaagtgacagccactctgctgtattcataatcactagtcttttttgatgactaaaata

SEQ ID NO: 745 - DNA, 401 bp, Artificial sequence
  /note="Description of artificial sequence: rs9294582"
  misc_feature (56)..(56): n is a, c, g, or t
atttgtattttaattggcatttctctgatagttaataatattgagcaattttcgtntctttatcgaacatgtagacaccctagattgtgaaatgcttgttcaagcattttgttcatactctactgaattctttgtagtttttacttattattattattttctaagagatggggtctgttctgttgctcaggctagacttaagtgatgtaatcccagctcactgcagccttgaactcctgggcttaagttgtccttccacctcaacctcctgactagctgagactacaggtgcaaaacaccatatatggctaatttaaaaaaaaaaatgtttttaaatgttggggtccaggctggtcttgaactcctggattcaagtgatcctcccttctcagtctctcatg

SEQ ID NO: 746 - DNA, 401 bp, Artificial sequence
  /note="Description of artificial sequence: rs7752145"
gtaaatgtaaaaatgggtatatactattgcacatgtagtcaagagagctaagttacatatgcctgatataaaatgtattctttgtaatagttggacaataatagttgaatatggggcaagatatcttatgaaaataattcattattgactgttttagttcttattggaaatgttcaatgctttagtcatgttattgtactaaagaatgagagttagttgaggtctaacacgatagggctttatctgtagccacaccatctggaaacatctagtgtaactctgtgattttgctttactcataggactattagagctgtggggaggaactataatacaagacagagtttctaaaagtgtgaaagaccaagtaatacatttgcttttgcctttggtattggcat

SEQ ID NO: 747 - DNA, 401 bp, Artificial sequence
  /note="Description of artificial sequence: rs7893293"
ccaacaaagatcaaaagagacaaagaaggccattacataatggtgaagggatcaattcaacaagaagagctaactgtcctgaatatacatgcacccaatacaggagcacccagattcatgaagcaagtccttagtgagctacaaagagacttagactcccacacaataataatgggagactttaatgccccactgccaacattagacggatcaagaggccagaaagttaacaaggatatccaggaattgaactcaactctgcaccaagtggacctaatagacatctacagaactctccaccccaaatcaacagaatatacatgcttttcagcaccacaccacacccattccaaaattgaccacataattggaagtaagcactcctcactaaatgtaaaaga

SEQ ID NO: 748 - DNA, 401 bp, Artificial sequence
  /note="Description of artificial sequence: rs9332172"
  misc_feature (71)..(71): n is a, c, g, or t
  misc_feature (294)..(294): n is a, c, g, or t
  misc_feature (390)..(390): n is a, c, g, or t
attttagcaaaaaaaaatatgctgtgtgactcagctagctgcaaagagcctgatgaatggaatttttaggnaagcatggaataagggagtaggaaataaagtttgggcaagttggtctacagcctctgctatacaagcagtattttttttctagtactgtactttccagtttctatgttggtaactatataactatgtgaataattttgaattcactgtaatcaaatatgctggtaaataatttgtcagataattgcatcaaatcattcctaggaaaagcacaaccaaccatcngaatttactattgaaagcttggaaaacactgcagttgacttgtttggagctgggacagagacgacaagcacaaccctgagatatgctctccttctnctgctgaagca

SEQ ID NO: 749 - DNA, 401 bp, Artificial sequence
  /note="Description of artificial sequence: rs965347"
  misc_feature (230)..(230): n is a, c, g, or t
caaagtttataactggcctcaccctataaactccttccctgccccaataatctgggctcagtttctggtgctaagaggtgtggctgcttcagaaggccatcaaactgaacatcaaacgcagttatccacaggcaggcaccctgcctcaggcgctttgacattttgtcaaactcttctcattgagaaaatttaaaacctctaagactcttgagtatggtaattacccttantccatatctcactttggattcttcctgatattcatgcttgttcagtgcttccagcagcacatctggtataacaactgctgggggttttgtcttctagaagcgaatttatttcagacttcgaaacaaagcaacagggttattcatgtcaaccaatggaaacttagaggatct

SEQ ID NO: 750 - DNA, 401 bp, Artificial sequence; identical to SEQ ID NO: 100
  /note="Description of artificial sequence: rs9480684"
  misc_feature (53)..(53): n is a, c, g, or t
  misc_feature (255)..(255): n is a, c, g, or t
  misc_feature (358)..(358): n is a, c, g, or t

SEQ ID NO: 751 - DNA, 401 bp, Artificial sequence
  /note="Description of artificial sequence: rs9486398"
gttgtcctcaaactttatttgcatcagaatcacctggagggcgggttaaaatagactgtggggccacatcctcagagactgagtctgtaggtctggggtggggcctgataattccttttctaacaagttcccaggtgttgccaatgctgctggtctgaggcccacacccggagaaccactgatagtcatttaaaaataacataagaatgacctaacctctgtgtgggaactcagtgaactagtgtgttgctattgacaggtgcagatggtgtgttcatgtcatctggggtaattctgctttaaattaatgggcacttttttattccctatcaggaaagtcagcacaattgtgttttgtagcgaactggtgataatgtaaccatactacatactccattaat

SEQ ID NO: 752 - DNA, 401 bp, Artificial sequence
  /note="Description of artificial sequence: rs9486399"
  misc_feature (17)..(17): n is a, c, g, or t
  misc_feature (76)..(76): n is a, c, g, or t
  misc_feature (213)..(213): n is a, c, g, or t
gggtgtggtggtgggcncctgtagtcccagctatttgggaggctgaggcaggagaatcgcgtcaacccgggaggcngacgttgcactgagccgagattgtgccactgcactccagcctaggcgacagggcaagacttcgtctcaaaaaaaaaaaagttgtagggacaagaaagtgctgtaatctgatttttaaaaaacaacttttctggatantggagaacgaatctggacattttcatcaggggctttggtaactgtatggggagcaaaagtggctgtcacttctgaatgatctccaggtaggtagcttggccaacccacttaaaacaatggacttaggatcagacagaatctgagaagttggaaagatgctcagaagcaaacaatgcctttgccttcat

SEQ ID NO: 753 - DNA, 401 bp, Artificial sequence
  /note="Description of artificial sequence: rs9480685"
  misc_feature (83)..(83): n is a, c, g, or t
  misc_feature (293)..(293): n is a, c, g, or t
gttcaagcaattctcctgccttagcctcctgagtagctgggattacaggtgcctgccaccacgcccggctagctacaacagtnttaattccttgttaaactgaatttaattttctcagactgggagaatggtgccatcttgtggacatgagagagcagcgccgcacgtcccacaccccatgcaaaggaaaatataaacacgtctcttctcgttggtgcacttactagcagaccatgatttccattagctacaactactgaaccatttgttatctattaaaattgccctaaganttattagatcatgcatctgtcttctagctcatcttcttgtgtttgggaaatgagttcttttggtagacattcatgtattattccagaccacataccttgtaacaacag

SEQ ID NO: 754 - DNA, 401 bp, Artificial sequence
  /note="Description of artificial sequence: rs9486403"
  misc_feature (109)..(109): n is a, c, g, or t
  misc_feature (362)..(362): n is a, c, g, or t
tgttaaactgaatttaattttctcagactgggagaatggtgccatcttgtggacatgagagagcagcgccgcacgtcccacaccccatgcaaaggaaaatataaacacntctcttctcgttggtgcacttactagcagaccatgatttccattagctacaactactgaaccatttgttatctattaaaattgccctaagaattattagatcatgcatctgtcttctagctcatcttcttgtgtttgggaaatgagttcttttggtagacattcatgtattattccagaccacataccttgtaacaacagtggaagctgattcatgttcactttaaaaaacatgaagtctgcacaatttaaanactctccaaaggcaagagaatgaatcaaattatttctca

SEQ ID NO: 755 - DNA, 401 bp, Artificial sequence
  /note="Description of artificial sequence: rs9480686"
  misc_feature (349)..(349): n is a, c, g, or t
agatttttactttgatggggtctttgttgatacatccttggtgctgaggtttatgctaaaaaaaggataagccatctgaagggatctttattctacactggaaaaaaaaaaatcagataacccttttgttaatgatacttctccaaagaaagaagccatgaggctgtttttagcactaaagtatctgaaacatccagtaaacacctttggaaaatcttacaaacattctggtaacagggagagagttcatgataatagttttacaatactgtggtactcagcatcctaaatgctatgaaattttatccaccaactgagtccccagtagtgacaatgctaccgcgtcccnttatgtacttccgggtgtcatccaaacctcccctttgacctaatacagcccg

SEQ ID NO: 756 - DNA, 401 bp, Artificial sequence
  /note="Description of artificial sequence: rs9486404"
  misc_feature (53)..(53): n is a, c, g, or t
aaagaagccatgaggctgtttttagcactaaagtatctgaaacatccagtaancacctttggaaaatcttacaaacattctggtaacagggagagagttcatgataatagttttacaatactgtggtactcagcatcctaaatgctatgaaattttatccaccaactgagtccccagtagtgacaatgctaccgcgtccccttatgtacttccgggtgtcatccaaacctcccctttgacctaatacagcccgttttcattgttcatgcaagtgctgttcctcgataaccattcctcccacctttccaccactgccaggactacctgctctttcctcgctggtgtctcgaatctaccatctcaccaccaaatatatgttagtctctttactccttttccct

SEQ ID NO: 757 - DNA, 401 bp, Artificial sequence
  /note="Description of artificial sequence: rs9320182"
  misc_feature (200)..(200): n is a, c, g, or t
aggcagatttttatatatgacactaagagatttagaactttaagagctgtggtgaccacattatggtggaggaacaaaaaaggaaaccttggcagttagaaagctgctcagtgatgaattcaagaaggaaccagctttaaattatctcttcatgccaacatccatctatacactgaaagttttagtattgtacattaagncgatcaggcccagcagggtggttcacgcctgtaatcccagaactttgggagactgacatggtggatcacttaagcccaggagtttgagaccagcctgggcaacatggcaaaactgtctctactaaaaatacaaaaaaactagctgggtgtggtgatgcatacctgtagtcctacctacttgagaggctgaagcaggagaat

SEQ ID NO: 758 - DNA, 401 bp, Artificial sequence
  /note="Description of artificial sequence: rs9320183"
  misc_feature (170)..(170): n is a, c, g, or t
  misc_feature (175)..(175): n is a, c, g, or t
gtggtgatgcatacctgtagtcctacctacttgagaggctgaagcaggagaatcgcttaaggtcaaggctgcagtgagctgtgattgtgccactgcactccagcctgggtgacacagcgagaccctgtctctaaaacaaaaaagacaataaagtagtttaagctagtaanacagnaggtgccacaacaacctgcaaagccagtgtgaaggaacagcttgaaaaaacttcgaatttctactgactacagacaaatccaagtgctgatatttttatatcaattactggccaaaatggtgtgtttattttttaaagcttgtatcatggaatgtataatctaatctggaaaaatgtttgaaagggatggctagaaaaaaatttgggctcacaggcactcaccaaa

SEQ ID NO: 759 - DNA, 401 bp, Artificial sequence
  /note="Description of artificial sequence: rs9486410"
  misc_feature (87)..(87): n is a, c, g, or t
cagacaaatccaagtgctgatatttttatatcaattactggccaaaatggtgtgtttattttttaaagcttgtatcatggaatgtanaatctaatctggaaaaatgtttgaaagggatggctagaaaaaaatttgggctcacaggcactcaccaaataagaacgtcaacaatcactaaactgcatttttatttaaacaacattaattacagtctttcctcgtgcgtgtcctctttccaccttcaggaaggcttctggaactttagaaaaaggaaaggtttgttcaataactggccggatctgtaaaacataagaggttgaccggtggataaaaaagcctacatctttcaaggcagatgacattgctaattagtttcttgacggtgtccctcaagccacagt

SEQ ID NO: 760 - DNA, 401 bp, Artificial sequence
  /note="Description of artificial sequence: rs9486411"
  misc_feature (6)..(6): n is a, c, g, or t
  misc_feature (103)..(103): n is a, c, g, or t
  misc_feature (107)..(107): n is a, c, g, or t
  misc_feature (315)..(315): n is a, c, g, or t
ggatgnctagaaaaaaatttgggctcacaggcactcaccaaataagaacgtcaacaatcactaaactgcatttttatttaaacaacattaattacagtctttnctcntgcgtgtcctctttccaccttcaggaaggcttctggaactttagaaaaaggaaaggtttgttcaataactggccggatctgtaaaacataagaggttgaccggtggataaaaaagcctacatctttcaaggcagatgacattgctaattagtttcttgacggtgtccctcaagccacagtctctctcaagtgtctctccagtggaccnaggtcaggctctcacaagggccatgatgctgcctccactcctgcctcactgctgcttctctctttatggcccctcccaccccactg

SEQ ID NO: 761 - DNA, 401 bp, Artificial sequence
  /note="Description of artificial sequence: rs9486414"
  misc_feature (384)..(384): n is a, c, g, or t
tgctatcaccattatgcactgagcctttcctatagcatctgctgctgtctacacctacccctaaaaccttaaaggaagggaaaggtagccaaggactgtaaggatttatcacagcctgcatgttggcctgccttccttgtgccagctgaggacctggtctctcgaccctgtgtccaggccaccaagatgacagatgtgtgctacacgggtgccatccacgcctatggaggacatcactattgctgatcccccacaagctgagcatgacctcagaatcttcaccactgcagccactattaactgctctgagctggcttgtgagacgaagcctatttgtcttctattctctccaagaataaggcagagggctgtggtgagtcccantttagggtggactgcat

SEQ ID NO: 762 - DNA, 401 bp, Artificial sequence
  /note="Description of artificial sequence: rs9486415"
  misc_feature (37)..(37): n is a, c, g, or t
  misc_feature (57)..(57): n is a, c, g, or t
  misc_feature (83)..(83): n is a, c, g, or t
  misc_feature (184)..(184): n is a, c, g, or t
ggaggacatcactattgctgatcccccacaagctgancatgacctcagaatcttcancactgcagccactattaactgctctnagctggcttgtgagacgaagcctatttgtcttctattctctccaagaataaggcagagggctgtggtgagtcccactttagggtggactgcattaatgttncagaatggaatgcattaatgtttctcggcccagtgcagtggctcacatctgtaatcccagcactttgggaagccgaggcaggcgaatcacctgaggtcaggagtttgagacagcctggccaacatggtgaaacctatctccactaaaaatacaaaaattagctgggtgtggtggtgtgtgtctgtaatcccagctactcgggaggctgaggcatgag

SEQ ID NO: 763 - DNA, 401 bp, Artificial sequence
  /note="Description of artificial sequence: rs6926307"
  misc_feature (25)..(25): n is a, c, g, or t
  misc_feature (84)..(84): n is a, c, g, or t
cggcacaatgagtcattcagcaatncccgtaagtgacaatggaaaaaaaggtttcaaattgaaggcaggcaaatgccactgctngctgaatctgtgacagcaaacagagattaactggataatgagacagtgtctatgtacagcctcacatcaggcctagaatacttgtttgttaaggacaaagggatcagagttaaaatacagaggggggaaagaaaggttactcacagtgaagtagggatgtttatgtgatgacgctgctatagtccacctggcacagggagccctgttataaagcgggcaggctcaacaccatgcttcccactgcgcagacacacgaggctcacagccggccagggacgctcacagcagcagccctcattcagtcttggattcatgtg

SEQ ID NO: 764 - DNA, 401 bp, Artificial sequence
  /note="Description of artificial sequence: rs6926670"
  misc_feature (64)..(64): n is a, c, g, or t
  misc_feature (142)..(142): n is a, c, g, or t
  misc_feature (318)..(318): n is a, c, g, or t
gataatgagacagtgtctatgtacagcctcacatcaggcctagaatacttgtttgttaaggacnaagggatcagagttaaaatacagaggggggaaagaaaggttactcacagtgaagtagggatgtttatgtgatgacgcngctatagtccacctggcacagggagccctgttataaagcgggcaggctcaacaccatgcttcccactgcgcagacacacgaggctcacagccggccagggacgctcacagcagcagccctcattcagtcttggattcatgtgtggggtgctgattgtgcctcgcatccctgatacnaaggctgaaccaagccaagccccaagatttggcacccgctgcctgacatcacttctgtgagaacgtagggacgacgggaacct

SEQ ID NO: 765 - DNA, 401 bp, Artificial sequence
  /note="Description of artificial sequence: rs6926833"
  misc_feature (123)..(123): n is a, c, g, or t
  misc_feature (260)..(260): n is a, c, g, or t
  misc_feature (377)..(377): n is a, c, g, or t
ggacaaagggatcagagttaaaatacagaggggggaaagaaaggttactcacagtgaagtagggatgtttatgtgatgacgctgctatagtccacctggcacagggagccctgttataaagcnggcaggctcaacaccatgcttcccactgcgcagacacacgaggctcacagccggccagggacgctcacagcagcagccctcattcagtcttggattcatgtgtggggtgctgattgtgcctcgcatccctgatacanaggctgaaccaagccaagccccaagatttggcacccgctgcctgacatcacttctgtgagaacgtagggacgacgggaaccttaacctctctggatgtggccttggaatattgctgnttacaagacgctaggcaagtcctc

SEQ ID NO: 766 - DNA, 401 bp, Artificial sequence
  /note="Description of artificial sequence: rs6907164"
  misc_feature (11)..(11): n is a, c, g, or t
  misc_feature (329)..(329): n is a, c, g, or t
tcagtcttggnttcatgtgtggggtgctgattgtgcctcgcatccctgatacaaaggctgaaccaagccaagccccaagatttggcacccgctgcctgacatcacttctgtgagaacgtagggacgacgggaaccttaacctctctggatgtggccttggaatattgctgcttacaagacgctaggcaagtcctccttcccgctgaggcaaaaaccctctctaacacttgaggcttcggaagacggtacagaaaacctctcactactgcaagagcatgaagctgctggtggagaaggacactgtctaggcagccatggcagcaggcagnggttttccctcaattcccgttttcccagtgagaatcacaaaacagtagagttaacatatccgagtgggcctc

SEQ ID NO: 767 - DNA, 401 bp, Artificial sequence
  /note="Description of artificial sequence: rs9480689"
agaaggtgagaggagaaaccccatataaatttcctcatagaaacaatttcagtagcatcagaaaaacctcagaagcattgaggccatgggatccatgagatacttgccacatcaggcaaggcagccctcttccagtggtcctagggattcagtccctaatcactacattctttctatggagcaaaatccagtggcaataaagaacttaaggtttagaatgtacttcgttgctaaacgagggcccagctattcaagacggacctgggaaatcacctacctcagaactcattacatttttctcgaaagctgcagtgtccaatatggtagcctctagacacgtgactatttacgttaatcaaaagtaagtaaataaaatgaaaaagtcagtctctcaagttgca

SEQ ID NO: 768 - DNA, 401 bp, Artificial sequence
  /note="Description of artificial sequence: rs7741101"
  misc_feature (94)..(94): n is a, c, g, or t
  misc_feature (319)..(319): n is a, c, g, or t
cgtaagggtcaagagacctgggccctgcctatgtgaccttgaacacatcatttaatttcttagggcctctgtcccttcaaatgtgacatcacancaggatgagggataaagggatgaagacagtaaactagacaagtgcaaagctttcctctttccagtctgtgagtatgctattcaatggcatatgcgtgacctgaatagaatttttgctatatctcctcccaccaaaaagtaagtgtgttaaatagtatgaaaacaggaactgttttttgtgcttaggagaaaatgccaataaactgtaggcatgaggcacgtcagnaccaacccagtacgcttaaggggataattataaatcattctttttgagaatgcccagaacagcagtttgcaaactagtgtcc

SEQ ID NO: 769 - DNA, 401 bp, Artificial sequence
  /note="Description of artificial sequence: rs7776287"
  misc_feature (187)..(187): n is a, c, g, or t
  misc_feature (213)..(213): n is a, c, g, or t
  misc_feature (235)..(235): n is a, c, g, or t
ctctactaaaaatacaaaaattagccaggtgtggtggtgggcacctgtaatcccagctactcaggaggctgaggcaggagaatcgcttgtacccgggaagtggaggttgcagtgagctgagatcacaccactgcactccagcctcggcgacagagcaagactctgtctcaaagaaaaaaaaaaaaanacgatcaaaattaaaaatgcatatcncttttgactcagcaattccatntccataaacagaaatggttatatatacaattaggtactaaacataaatattgggttatccactgaagcactgtttgcaaaagactgaaattaaacaaattatggtacacccatacaaatactatgtagctgttaacaaaaaaggaatgagaaagcttttatatcct

SEQ ID NO: 770 - DNA, 401 bp, Artificial sequence
  /note="Description of artificial sequence: rs7776294"
  misc_feature (1)..(1): n is a, c, g, or t
  misc_feature (215)..(215): n is a, c, g, or t
  misc_feature (227)..(227): n is a, c, g, or t
  misc_feature (249)..(249): n is a, c, g, or t
naaaaattagccaggtgtggtggtgggcacctgtaatcccagctactcaggaggctgaggcaggagaatcgcttgtacccgggaagtggaggttgcagtgagctgagatcacaccactgcactccagcctcggcgacagagcaagactctgtctcaaagaaaaaaaaaaaaaaacgatcaaaattataaatgcatatctcctttgactcagcaantccatttccatnaacagaaatggttatatatacnattaggtactaaacataaatattgggttatccactgaagcactgtttgcaaaagactgaaattaaacaaattatggtacacccatacaaatactatgtagctgttaacaaaaaaggaatgagaaagcttttatatcctgacataaaacaaat

SEQ ID NO: 771 - DNA, 401 bp, Artificial sequence
  /note="Description of artificial sequence: rs6903754"
  misc_feature (55)..(55): n is a, c, g, or t
  misc_feature (248)..(248): n is a, c, g, or t
  misc_feature (325)..(325): n is a, c, g, or t
  misc_feature (347)..(347): n is a, c, g, or t
tcaaaaaagggaaaaccttttaaacagaagcagtaaaatagctttccaaatactnctcatttctgctctcagcttcagcttggtcttggctggataaaggtcagatgaataagctggagtcacagtcagaatcaacatgacccaagagaattcctgaatgcattcctgcttggtacctcaggccaaaccacagcctggcaatcagacacactgggaacatccacagtgctcccattaccaagatttanacttacactgtttctcttaagccttttttaagccaaaacacgaaagtatgttttgggctaatcatgtatttcatganctactctatattcttcctgtgntgacagatgccacagaagggaacacatttccaattttgtcttcaggcctcttac

SEQ ID NO: 772 - DNA, 401 bp, Artificial sequence
  /note="Description of artificial sequence: rs9689006"
ctacctactcaggagtttggggtgagaggatcattgagcccaggaggttgaggttgcagtgagctgtgatcatgtcactgcatctcagcctggatgacagagcaacacactgtctcaaaaataatgacaactattgcactgtatttaccttatcagaacatatggctgttcctacactctctccttctaagccctcatttagttttgttctacaggtaattgtgttgaacatttaccactagtccttaaaatgtcttcatagtcattcctagtcagaagctcattatctagtagattcctcagaaaaggatcagaagaacaatattccccacgttcttcatgttgataacagtctgtatgtgtccatgatacctgaaggcctgttttgttgtataaaagat

SEQ ID NO: 773 - DNA, 401 bp, Artificial sequence
  /note="Description of artificial sequence: rs7770930"
  misc_feature (62)..(62): n is a, c, g, or t
  misc_feature (295)..(295): n is a, c, g, or t
  misc_feature (388)..(388): n is a, c, g, or t
aattaagaattagaataccacctgtgtccctaagcctcccaattaaaacctcctcaactccnttaaaaagtaactactaactggacctttagtgtaaccctttttgcttttttttttttttaagaagttttactaagtagacaccacccttaaacaccactgcttagtttcacttgttcttgaatgtcattaaatggaaccatataggatgtacttttgcatctgatttcttttactcaacactcggttgtggtattcatccacttcactgtgtgcaattatagttttttcatgnctgcataatattccaatgtaagaatataccacaatttacttactcattttactgttgatggacatttgggtttttctagttggggaattttancaggaatagccct

SEQ ID NO: 774 - DNA, 401 bp, Artificial sequence
  /note="Description of artificial sequence: rs6842486"
ttagagttaaaaaccctgtggtttgcttttttcctggccttctgtttttattgctaaaagtcttttgaaaccaggcccttacaatccaaaaagtttgggcttttaaatgtgttgtgtgggcatcaagagcctattttgaaagtcaaaaccataacatttatttttttcccctgcatttttcaatgttcttactggcaatgaggacaccatagtgtaagtatcaatcacatataaggaagtacgcacacagaaaattacagaggttaataattcagtgtattatctctaatgatactaacacttttgatgggacacatagaactattacatgtcaaacattgcttatgtgttatttaatactcgaaataaccctatgacataagtgctgttgttatatctat

SEQ ID NO: 775 - DNA, 401 bp, Artificial sequence
  /note="Description of artificial sequence: rs6813802"
ttgaaaaaatgtcggagtctcatttgtgaacgacttactttatttcagacagattgcagaaacagtgtgatgaagagataacataaatttagtagttagattagttagattgaagttcaaatcctgaacacatcatttcttagatgcatgacagggaatatgaccttgagcaagttacataatatctgagtccattttctcctttatgaaatagaacattattttctatcttgtaagcttaaaagctcccaaatgtgcatgtaatgactattaacaggtagtgtgtccctcagaggcctggaatagaaacttttatgaaccctaaaattttttttcagaaaagctaggtatagttgttatttatatttatatcatgggagtattcttgattgcatatatga

SEQ ID NO: 776 - DNA, 401 bp, Artificial sequence; identical to SEQ ID NO: 23
  /note="Description of artificial sequence: rs9877859"

SEQ ID NO: 777 - DNA, 401 bp, Artificial sequence
  /note="Description of artificial sequence: rs742930"
atgtcaaacaagcctaaataatagtaagcacatgttgtttgccctattatctttatattaaccaagacttttaatatcatcagtaaacctgactctggcaaatgctcacctcactgaagttctcagaactgaaaagcattaccgaggcagtcccataagtcactggtctcattagggaaatttgattggtcaattcttctccaccaacggattacagaacactactctatatactggagtgattctaaattcaatttctgtaacaaactatgttcaaatacatacctttatacagtgcaatatgcccagaatgaataaacaatactgttcactgaaataaaggtggtgggaatgacttccaattacacagttagttataatggctacagccaaaaaggcaa

SEQ ID NO: 778 - DNA, 401 bp, Artificial sequence
  /note="Description of artificial sequence: rs7770203"
  misc_feature (367)..(367): n is a, c, g, or t
ttatctgaaaagtatacagtgcagaagtgtccaagcaaataatacattcatgggttcttagtttctgtttctggttaggccggtaaaaccccttcctcatccctcttttctgcttatcattacagacagaaactaaaaaccatgtcttcaggctgctaaaagcctaaaacaaaacaaaatagaacaacaacaaaataagccgggctggacaagcttggtgtgacactaaaatgacaacaatgatactagggaccagaaactgagagtactatttagagaagacttcagactttttttttatgtttcaaaatttagaacatatatttggaaatttggaagtgttcacatatcttacttgagtaattangagataattttaaaataacatttaaccttagaaa

SEQ ID NO: 779 - DNA, 401 bp, Artificial sequence
  /note="Description of artificial sequence: rs926829"
  misc_feature (299)..(299): n is a, c, g, or t
gtttttgaagagactgtggtttcaccatgctgaccaggctggtcttgaactcctggactcaagcagtctgcctgcctcagactcccaaagtgttgggattacaggtgtgagccaccacacccagcctacatttttaaatattatgtaaaaatagagatttaggtaactatttttgattgaccttacaaagaagtacagtgcactatctaaataatgtaaaaagtgtttatttgggtttataaacactgtgcttgaaactttcctgagtttgttcctctgtactgtacagcttccacctnagttctgcggctttcacagtccgaacaggctctctactgcaggaattaataattctctgagtcttgcagcttcctagctgtggaggctctgccaaaacccgc

SEQ ID NO: 780 - DNA, 401 bp, Artificial sequence
  /note="Description of artificial sequence: rs7719325"
gggattctcaatccaagtgctgacattctggctaaaagagcagtaagagatggatgatataggcacagtcttggcatgtctgagccctgtgccagaaggttatcagcccttttgggggagataatatctgcagctttaattttctctctgactaccaggcataatgtaaaattaatgtgcatcatgtcaaggttatggcaaggcattgttgtctggaagggaaaactgtttgctcccccgccctccaaacacttgcacataccgtgataatacattattaaaaagcacatttctttgtcattgtcaatagtggtgagccagtaaaggatattttccagcactcattatgcaggaggaagttaagagacttctaaaactcagtcttaaaacaaagaacatac

SEQ ID NO: 781 - DNA, 401 bp, Artificial sequence; identical to SEQ ID NO: 68
  /note="Description of artificial sequence: rs6873640"
  misc_feature (131)..(131): n is a, c, g, or t

SEQ ID NO: 782 - DNA, 401 bp, Artificial sequence
  /note="Description of artificial sequence: rs7725329"
  misc_feature (109)..(109): n is a, c, g, or t
aataatgtaaagaagtcattatggaaacagctatttgctagtgtccctgccagagctggacgccttctcatccctctgtattctcaggtgaggtgggaggtgttttttnttttttttttctcactcttttttttctaatacaaatttttcttcatctgagtttactcaaagccaatctaaaagcagttctatgtggtgcacgaccttgtcattataggacaagaattgagtttgctttatctgacagtttgctctggatttgcttttatacctactcatcaaccccaaagacaaagaactctgttttaagtgatagaggagcaactgaatgagccatgtttccccgggaatgctctaaaattaccttagatgttacatttgatttattgattgcttcaaac

SEQ ID NO: 783 - DNA, 401 bp, Artificial sequence
  /note="Description of artificial sequence: rs554710"
  misc_feature (132)..(132): n is a, c, g, or t
  misc_feature (397)..(397): n is a, c, g, or t
cacagagagaggacttctgtcctgatagacgtcggtgaggactgaatccccacttacaggcgtgcacatcagggactgatggacatcgctgaggaccgatcccagcttacaggcgtgcacactggaggctcngaagagctgactgtgactcacttccggcttccccccaggacaaaacctgcctctccttccagactcgccgacttcccttcatgtcccgctgtgatgtgcagtccagcatccttgggtcatgacaccagctgcactggcacagggaatgagagaatattcctgaaaatgaagactaccgcggaaggcaggagcttctaagctagagtgactggcagcttcaacaggccctgctgcacctgaaccagcccggggccccccagtgccncgga

SEQ ID NO: 784 - DNA, 401 bp, Artificial sequence
  /note="Description of artificial sequence: rs6825957"
  misc_feature (79)..(79): n is a, c, g, or t
tttcttattttttgattgaatatatttaaggtgtagaacatgatgtttttaatatacatatattaatacatggtgatangattactacagtaaaaaattaacatatcaccttatatacttttttcaccatcaaatagttacctcttttttgtagtaagagtacctacaacctactgtcttagcaaatttccagtatacaacgtaatactaactatagtcctcatgctgtacattagacctctagacatattcatcctacataactgcaactgtgtaccatttgacctacatcttctcatccttcccccatccccactcctaggaacaactgttctactctctgtttctacgtgtttgacttttcttaaattccactcataagtgagatcatgcaatatttt

SEQ ID NO: 785 - DNA, 401 bp, Artificial sequence; identical to SEQ ID NO: 88
  /note="Description of artificial sequence: rs720733"
  misc_feature (145)..(145): n is a, c, g, or t

SEQ ID NO: 786 - DNA, 401 bp, Artificial sequence
  /note="Description of artificial sequence: rs6825255"
  misc_feature (137)..(137): n is a, c, g, or t
  misc_feature (353)..(353): n is a, c, g, or t
ttcccttcacggtcctgaggctcagtcccaaccctgctgatagatcagagcaggccctgggaggggagagaggccaggcagccagagcagaaatctctgagcctgcagggatgaggggattcttccagaagcccctnagggtgcaggctgcacttgggagggctgccgcagctgcacctcgggagctcctaccccaccaactcagaaggggcagggctcccacttgtccctgactcctgcccactctatggagtgggaggcccaggtctgcaactgcaggttgggcagcttcagctgcaccagggagggcagatcctgcctgctcctgtcccccaccaagagcacaggaaganctggatccacagctgcagtttgggtggctgtagccccacccaggaggg

SEQ ID NO: 787 - DNA, 401 bp, Artificial sequence
  /note="Description of artificial sequence: rs6853959"
  misc_feature (133)..(133): n is a, c, g, or t
gcagccctagctgcatgtctttgcagcagctggtgtgatggtagcagccgctgccatcactattatttgtgttttgcttcctgagtgatacagaatttggtatctaaaataataatgatgcataaaatgtggngttgattgaagggaagggctggcaggtgaataataaggactctctaatatcaatcagacatttcactagaaatatggttacccttgtaatgtattagcagaatatttgaccaaacattcacctttctcatcttaaacagcagactgagccatcaggttacatttttattactctttgaaaatactctcctatattgcctcctccctgcattacatattacatattacatattatttattttgaaatatttcagacatgcaaaagggta

SEQ ID NO: 788 - DNA, 401 bp, Artificial sequence
  /note="Description of artificial sequence: rs875588"
cttactgtactttccccaccatatccaacaatttgccatggataactttaatcacttcaaaactataaaacaaaaagtataaattagacatccattttaatgttgaagtttttaaatgtatgttatgttgccagctggaaaaatgtaaaatgtcacagactcaccattttaacataacataaaatgaacacaaagaactcctgttttttcctagcaatccattcacatgtgcatacatctgacactcagcaaccctgactgaggatattcaaagtgaaacaggtaaggcattcaaacggaaagcctaccactgggctgagaaaccacataaatgcaaattttaatcacccaactcattcagcaaagaaccaactgtttacattacaacttgaacagctttt

SEQ ID NO: 789 - DNA, 401 bp, Artificial sequence
  /note="Description of artificial sequence: rs7805967"
  misc_feature (72)..(72): n is a, c, g, or t
ttagatagaggttaaattcaataaaaaggattagacaattctgatcaacaaactggttgattcagaaagttntactgacatatttcttgtatattcataaatatttgtgtattcagcatataggtttctaaaaaacaaaacaccactcttctcacactcatgtttgagatttgagaatgctcattaaactatgagttactaaggtaaaaggcatataacaaaagaaaacacacccattttagtaaggagaaacttggtcaaaacttgcaacagtgccactgagaagacacagtaccaagctttttgtcctctgctttgcactaggccagtgttttctcaaatacataaggtccttggtgagcacactttcatatttttaatccagctcaatgtatttttca

SEQ ID NO: 790 - DNA, 401 bp, Artificial sequence; identical to SEQ ID NO: 18
  /note="Description of artificial sequence: rs965118"

SEQ ID NO: 791 - DNA, 401 bp, Artificial sequence
  /note="Description of artificial sequence: rs758666"
  misc_feature (304)..(304): n is a, c, g, or t
agaattcactccgaagtgtcatgcttgcttggtttgcgtcttatctgtagtagaattgagtctttctctcccgcatttctctttttgttgtgcttacatgtttgcagaaggactcctcatggacatttgaaagagaagttggtgttttagcaagatacaccatcccaccttttgcaggattgagagttgaatgttaataactacctgatggcatagtacataatttgtgaatggggatgcaaatatgggcttttacagttaatacagttttatgagatgaaatgcttttctaagacttctgtgncttagatataaatgtgtctgcctattttgctagctttatttttttttttattttttattttttgagacggagtctcactgtgtcatccaggctgcag

SEQ ID NO: 792 - DNA, 401 bp, Artificial sequence
  /note="Description of artificial sequence: rs736645"
  misc_feature (99)..(99): n is a, c, g, or t
aaaggttctggaatactattttagtattttaattttcttcaatatatgttgggcttctggttattaaaaaaaaaaaaggagttcctgtaggattggagntttaaatctaaactggtattagtttagaacaggaagtgctagaaaagcctttacgttgtgctcttatgggcaagttaagaaagcagggcagtttaaagatagtgatagaattcactccgaagtgtcatgcttgcttggtttgcgtcttatctgtagtagaattgagtctttctctcccgcatttctctttttgttgtgcttacatgtttgcagaaggactcctcatggacatttgaaagagaagttggtgttttagcaagatacaccatcccaccttttgcaggattgagagttgaatgtta

SEQ ID NO: 793 - DNA, 401 bp, Artificial sequence
  /note="Description of artificial sequence: rs6980020"
  misc_feature (22)..(22): n is a, c, g, or t
gcttctaagatgtgacaccaanagcataagtggcaggagaaaaatagatatatcggccttcaaattaaaaactttctgctttgaaggacaccatcgagaaggtaaaaggacaacccacagacaggagaaattatttgcaaatcctatgataccacttcacacccaataggatggctaaaatgaaaaaggcagtgtaacaagtgttgacgagaatgtggagaaaattaaaccctcatacattgctgatgggaatataaaattgtgcagctgttctggaaaaaatctgacagttcttcaaaatattaagcacagagttaaccataatgacccagcaattccactcctaggaatgtacccaagagaaatgaaaacatgtctacataaaagcttgtacaggaatg

SEQ ID NO: 794 - DNA, 401 bp, Artificial sequence
  /note="Description of artificial sequence: rs6948196"
  misc_feature (279)..(279): n is a, c, g, or t
tgacaaccagcttttaattatggtctaatggtaaactaggttaccaaagctctctgtacaggtaaaatcccagtgaaagatgtaccaggctgaagacagtttacgtaacactaccattttaagttgagttacttcctatcgcgggactactccgttgtggtagaaataacggaatgtcagggagctggtacttttggccaccacggcaacagttaatacaaagcactccctgaaagccagactcccagagttataggtgacgtgtccttaaaagctttnacattgtaaataccaggaaaagtacaggggactggcagggagaattgtatagactacctgagaattatattttacctattggtagttctgacaacactcaaaaaaaaagaaaaaaagaaaac

SEQ ID NO: 795 - DNA, 401 bp, Artificial sequence
  /note="Description of artificial sequence: rs6943752"
  misc_feature (32)..(33): n is a, c, g, or t
  misc_feature (136)..(136): n is a, c, g, or t
ggaactgtttcaaatgtatgtcaaccttttgnnggaagaaaaagaaaacaaaaagactttggaattacttcaacagcctggttgcaagtacctgaccttattccttcccgaacaaaaatagggcaccgagagatcngacattcctttttctctgtcttcctacccaggccgccagcagcatctcgagggcctccagagggacctcttttgggggatcgcctaggtttcctatgcagaaaacttgcgttcagtgcccaaacgtcctctaaatccctagttttctttacaagggtaaacttcaccacagatggaatgaagccgaggcgctgcttcctttgttaaaatcccacggactttcttttccttacatcgggggcggggtgggggagaccgccagcccc

SEQ ID NO: 796 - DNA, 401 bp, Artificial sequence
  /note="Description of artificial sequence: rs7794922"
  misc_feature (378)..(378): n is a, c, g, or t
  misc_feature (398)..(398): n is a, c, g, or t
acactggtgtcattccaaatcaaacaatgcatgcaaaggttattctattatgtggtcatcttattggagtcaaaggggcaggtcctttgtggatggaagaggggtttccttggtggggagttgactgtcctgtccgcagcgttgtaggatgaaagccatcctgggaaaggtgaattccctgaatttcactgggaggaaggaaaatcctgccctctctgacatacgggatcagtttggtctgaactctgaggtatggagttgcatggagtcctcccagaagagggaatgtggagtaagccagccctaaggccatgcaggtagggcatgtttgagagagggctggctcagcaaagaactctgaggacaggtctggggttntacagtagttgtaaattgtnctc

SEQ ID NO: 797 - DNA, 401 bp, Artificial sequence
  /note="Description of artificial sequence: rs9798968"
  misc_feature (246)..(246): n is a, c, g, or t
aaagagataaaattaatccaatttggtaataaaccattttttaacctcgaatatagttattatacaatttctctgcccaaatatatgtattgagaaacaacaatctgtcagcaatgtggttcttgtagttgcaatgtgttttgggattagtcttaattggaattgtgtgttatggatccaaacaacatgcattcaggaaaaaacaatcattccacctgcttggggaatcagtacgtaagagcaagngtgtgagagccttgtggagaatttttgctcagtgaacagttaaagtgagactctaaggagctatcccctttaaactagcactgtacagtaggcactggctcattgccacagggtagcctttgcaggacatcttggagaatatccttatgattatt

SEQ ID NO: 798 - DNA, 401 bp, Artificial sequence
  /note="Description of artificial sequence: rs7574599"
  misc_feature (88)..(88): n is a, c, g, or t
ctgctaccacgatggctgttgaggtggatggattctcccctcagtttcctctgccagttcccttggtctttcagtttcttacgttttnctttttcacagtttacattttcctagctatttattccatcagttgatcttacaaagtgatgtgtttttccccaagagtaaactgtctagatatactgtgaccttcaagaacaactttacagtcaatttattttaaagactgtatatcagcacatacgaaatcctacttactgacacaataccttgtgatatgaacttagaagatagtcgataaattttcattaattgttttgattaattttcaatctatctaaaaaattatcattaaagttcataaaatacatcatattttatattaatacctctatagtttg

SEQ ID NO: 799 - DNA, 401 bp, Artificial sequence
  /note="Description of artificial sequence: rs6747725"
acatccaagaaggaaaaagaagtaatatgatccttcctgtgaagcagcttctcagttcttacattcattttaagaagacccttagaaaactggagggtgcagttgtcattctttggagcttagagtaaattttcttctccttaatgtccctaaagcacttcgtttgttgctcacttttgcatcattctgccatgtcgtacattggaattatatacaaataacacgcaacaaatatactttgggttagacactattctcagctttggagatctagggtctcacaacctgatgatgaagataaataagaaaataaattattactacacagtgtgtgaggtgatgtactgaagtacccacaggaagtatagagggagtcaccaacgaatgtgtacatgtcctgc

SEQ ID NO: 800 - DNA, 401 bp, Artificial sequence
  /note="Description of artificial sequence: rs924800"
  misc_feature (169)..(169): n is a, c, g, or t
cctaggatctgcggcactgtgggccagtttatatggggcacatgctgctttgtttgcacttctttggcatccagctgacagtgaaactgatgtcttgcttttcaggggtaccagccttcaagagtccactgggtgtccttagtctgaagagatggataaaaatgctagnggaagacaggaaacatagtttatttttatgaagaaaaaatattcttccatcttgatgacatatttattgtgagagtttgtgcccttctgtgtgatacttgaagcacagagatgacagagaactctggtcaggatacttgttcccagttcatatgcccagtggtggcttcaagggtttttgttttcataaaacaaaaaaatgaagttgatgcaatttattaaccaactaattc

SEQ ID NO: 801 - DNA, 401 bp, Artificial sequence
  /note="Description of artificial sequence: rs9312392"
  misc_feature (122)..(122): n is a, c, g, or t
acgaaggagactaataggagaaaagacaggcaaatttatttgatcttagtggagtcttcagactgcggacccagagatgcaggggaaattgtccatttttatgcttaggttcaacaacgtanggacagctgtgtggaaataggattaaacaaaaagggtgtgatctagtgctgagacactgggtggactgagacactgagagggggcacccagcaaggcctgacatgcagattcttcctggcctctctgggcatcatccctcccctctggtgtggggcagggccctctctgcaatggggtctcatgacctgcagtcaaagtcggtcggagagtgtctttattgccagttttgcatggaattgagggggcaaagctggaataatattttaggttttatggct

SEQ ID NO: 802 - DNA, 401 bp, Artificial sequence
  /note="Description of artificial sequence: rs9312393"
  misc_feature (401)..(401): n is a, c, g, or t
ttattgccagttttgcatggaattgagggggcaaagctggaataatattttaggttttatggctggcatagggcaaaagggattctggtttctataacctgctttgtggaagagggattccagtttctatggctggcctcaggggagaatgagactgagataggtgggcaggagacagggaaaaacatttgtttctgaggacttcattttgggttattgttttctgagtcccaatactatatactactttatcttacaaatgtactacaattttttatattgtcctcttattgataaaatataggttcttcatactgttcacaaagatggtttattgttatttatgctgaaagtttctgtcttaaaataagactgacttattttcttttttattaatattn

SEQ ID NO: 803 - DNA, 401 bp, Artificial sequence
  /note="Description of artificial sequence: rs7689338"
tatttaccctgaaatggtcaacatgcatgcttatctttggaaagactaaagtggctcagtatctttgtcatcttcccaaacaatacaattctatactcttctcatcttccatatttttgagatgtagaatttaatattcatttttctaaaagtttcaccaaaattgtcttaaggtttcttttcaattccaatcaataccaatctaaatgtaacaagttttaccaacttctatgtatacaattactttctatctatttcttcttctgggtttttcattgttgaagcacatctttggggagaattttcagcaagcctctgtgagcggtaaactcagtctttcatgtctgaaattgcctttgtttttccttacaatgattgcattgccacctgacatttaccaa

SEQ ID NO: 804 - DNA, 401 bp, Artificial sequence; identical to SEQ ID NO: 12
  /note="Description of artificial sequence: rs7676106"
  misc_feature (12)..(12): n is a, c, g, or t
  misc_feature (54)..(54): n is a, c, g, or t
  misc_feature (254)..(254): n is a, c, g, or t
  misc_feature (374)..(374): n is a, c, g, or t

SEQ ID NO: 805 - DNA, 401 bp, Artificial sequence
  /note="Description of artificial sequence: rs6553287"
  misc_feature (1)..(1): n is a, c, g, or t
  misc_feature (148)..(148): n is a, c, g, or t
  misc_feature (321)..(321): n is a, c, g, or t
ncatttacccaaatttcatacacagacacacaccaaaacaaaaacaaaacaaaaactgaatgaatatttttgtgctgatacaaaccgtcacaaaggaagtaatgatgggatttgtctacattaacctgacatactggtgaaaataacnccattgttcattatttgaattaggcaataatttggagaaattcttgaagaggacataaaggagaccgcagatacgtgtgggctgcctgtgaaaggcatgctgctttgtaaatattcacactaaactttcaaacacaagagtgatactaccctagcaaaacctaaggttctccngggaggcaggtgactagttccactttttctctttccttaatgttacaattgaggtttcctttgattacccttctctcaag

SEQ ID NO: 806 - DNA, 401 bp, Artificial sequence
  /note="Description of artificial sequence: rs6820247"
  misc_feature (40)..(40): n is a, c, g, or t
tgcatttcccctagattttctaattgtgtgcgtagagtcnttcatagtagtctctgagacttttgtatttccccttttaaatctctatttttttcaaagaagtgatcttcaataaactaaagacaaagaattggaaaaactggttcaaataatctagatgttcagtgcctggagaatgaatgtaattcatttaatatttacccaattatggtcactggtgacatcctcattggccaacaacattgaggtcccatgaaatcccctggctctctgttcctttttaccccagggatctgtgcaaaggctgtgaatgtcatggttccagcaacctttgtttcacccattgccatccccattgacatacccttatgatgtggagatgggtccttataaagtgtggg

SEQ ID NO: 807 - DNA, 401 bp, Artificial sequence; identical to SEQ ID NO: 49
  /note="Description of artificial sequence: rs7685314"
  misc_feature (1)..(1): n is a, c, g, or t

SEQ ID NO: 808 - DNA, 401 bp, Artificial sequence
  /note="Description of artificial sequence: rs7437007"
ttaaggcctaaattcccaaattagccatgctcagatgacttgatcaaaatgccacataaatcaataatttaaaatggctagttatgtgaacaaacagatctgagcaaattttaggtttattaacaagggaaagaaagaaaaaagaaaacaagaaaggggaggaggaaagacaagaaagaaacttgctgaaggcaacacatcgtaaggcaacagtaattctgggaacagggaactatttgttctcgtgggtaagtgtgcatctgcatccatttgtgtgtgcgaataatatatgtttgctaaaacttgaaaatgacatcatccttaaacataaaagtttgttagtttatttaaataataaattgaaattgtggctgggcatggtggctcacacctgtaatccc

SEQ ID NO: 809 - DNA, 401 bp, Artificial sequence
  /note="Description of artificial sequence: rs6702310"
  misc_feature (326)..(326): n is a, c, g, or t
  misc_feature (334)..(334): n is a, c, g, or t
gagccatgggagatcccgacactcccaactttgctaccaatgactcagatagagggacacatgtatacatgtgtctgtgcacattaatggaccagcactggccatgtttctatgaggccttttcttttacatgattaccatttaagaagcagcaggtgaatctaacctattttgttttcttacaagtaatactgtgttcgctttttgaaatttcttttctgaactttagtaaaaccatttgctactctttcactctctttttgtgtttttttttttaatttttaattttgattttcataggttttgggaaacaggtggtatttggntacatgantaagttctttagtggtgattcatgacattttggtgcacccatcacccaagcagtatacactgaaccc

SEQ ID NO: 810 - DNA, 401 bp, Artificial sequence; identical to SEQ ID NO: 90
  /note="Description of artificial sequence: rs7550277"
  misc_feature (29)..(29): n is a, c, g, or t

SEQ ID NO: 811 - DNA, 401 bp, Artificial sequence
  /note="Description of artificial sequence: rs7539742"
  misc_feature (33)..(33): n is a, c, g, or t
tttccatctgtagtacaatcaccgaacaagccngaaactgtgtcatggcctctttaatccatactattccttctacagagactaattcccttaaaaactaagagacagatgcagccttagcctcggcctacacagggtccagatcatccatatcactgtttccacctccatgtcttgtcctactggaaggtcttcagaggcggtaatatgcatggagctgtcgtctcctgtgacaacaataccttcttctggaatacctcctgaaggaccttcctgacgctgttttataactaacttattacatacttctacttacataagtaaaaatacactctaaataatgataaaaactatagtatagtaaatacataaaccagtaacatagtcattatcattattaa

SEQ ID NO: 812 - DNA, 401 bp, Artificial sequence
  /note="Description of artificial sequence: rs6429256"
  misc_feature (74)..(74): n is a, c, g, or t
  misc_feature (138)..(138): n is a, c, g, or t
  misc_feature (367)..(367): n is a, c, g, or t
tcacattcactcactactcactcactgactcacccagagcaactcccaggcctgcaagctccattcatggcaantgccctatatgggtgtaccatttttttcctcttctataccatatttttactgtaccttttctangtttggatacacaaatacttaccatggtgttacaactgcctatagtattcaagagagcaatacgcttccaggtttgtagcctaggagcaggctataccataaagtccaggtgtgtaggaggctacaccatctaggtttgtgtaagtacacgctatggtgttagtcaactaaagaaacaaatagtggtgagagaagagaaatcacctataggtgcacttctcagaacatnctctggttttcagcaatgtatgactataaatcag

SEQ ID NO: 813 - DNA, 401 bp, Artificial sequence
  /note="Description of artificial sequence: rs6684760"
  misc_feature (92)..(92): n is a, c, g, or t
  misc_feature (265)..(265): n is a, c, g, or t
  misc_feature (328)..(328): n is a, c, g, or t
accttttctatgtttggatacacaaatacttaccatggtgttacaactgcctatagtattcaagagagcaatacgcttccaggtttgtagcntaggagcaggctataccataaagtccaggtgtgtaggaggctacaccatctaggtttgtgtaagtacacgctatggtgttagtcaactaaagaaacaaatagtggtgacagaagagaaatcacctataggtgcacttctcagaacatactctggttttcagcaatgtatgacnataaatcagcaaaaataaacggaggtgaaataatagttcctctaactgagtgatgtgattatntaagaattttagttccttcctactatttttctattttcttccaacctttctgtgaagttactttcataattta

1. A method of diagnosing a predisposition for or the occurrence of treatment emergent suicidal ideation in an individual, the method comprising determining the presence or absence of one or more of the SNPs selected from the group consisting of SEQ ID NOs: 8, 18, 19, 47, 50, 52, 56, 64, 73, 86, 87, 92, 94, 95, 97 and 99.

2. The method of claim 1, wherein the SNP comprises SEQ ID NO: 8.

3. The method of claim 1, wherein exactly 2, 3, 4, 5, 10 or 15 SNPs are used.

4. The method of claim 1, wherein, in addition to one or more of the SNPs selected from the group consisting of SEQ ID NOs: 8, 18, 19, 47, 50, 52, 56, 64, 73, 86, 87, 92, 94, 95, 97 and 99, one or more of the SNPs selected from the group consisting of SEQ ID NOs: 1 to 7, 9 to 17, 20 to 46, 48, 49, 51, 53 to 55, 57 to 63, 65 to 72, 74 to 85, 88 to 91, 93, 96, 98 and 100 are used.

5. The method of claim 1, wherein instead of or in addition to a SNP as defined in claim 1, a corresponding tagging SNP is used, wherein said tagging SNP is provided in Table 4.

6. A method of diagnosing a predisposition for or the occurrence of treatment emergent suicidal ideation in an individual, the method comprising determining the presence or absence of one or more SNPs selected from the SNPs selected from the group consisting of SEQ ID NOs: 1 to 100 in a sample obtained from a patient, wherein presence of the respective SNP(s) is/are indicative of said predisposition for or said occurrence of treatment emergent suicidal ideation.

7. The method of claim 6, wherein the number of SNPs used is selected from the group consisting of 2, 3, 4, 5, 10, 15, 16 or 18 SNPs.

8. The method of claim 6, wherein said one or more SNPs comprise the SNP defined by SEQ ID NO: 1.

9. The method of claim 6, wherein said SNPs comprise the SNPs selected from the group consisting of:
(a) SEQ ID NOs: 1, 3, 66 and 78; or
(b) SEQ ID NOs: 1, 3, 6, 9, 21, 23, 29, 32, 38, 53, 55, 59, 61, 62, 66, 76, 78 and 94.

10. The method of claim 1, wherein said determining is effected by allele specific hybridization, allele specific oligonucleotide ligation, primer extension, minisequencing, mass spectroscopy, heteroduplex analysis, single strand conformational polymorphism, denaturing gradient gel electrophoresis, oligonucleotide microarray analysis, temperature gradient gel electrophoresis or combinations thereof.

11. The method of claim 1, wherein said treatment emergent suicidal ideation occurs or may occur in a patient being administered selective serotonin re-uptake inhibitors, selective noradrenalin re-uptake inhibitors, dual serotonin and noradrenalin re-uptake inhibitors and/or tricyclic antidepressants, and optionally being administered neuroleptics, mood stabilizers and/or benzodiazepines.

12. The method of claim 1, wherein said individual is a child or adolescent.

13. The method of claim 1, wherein said determining comprises isolating a nucleic acid from said sample.

14. A kit comprising
(a) one or more agents suitable for determining presence or absence of two or more SNPs selected from the group consisting of SEQ ID NOs: 1 to 100; and
(b) optionally a manual with instructions for performing the method of claim 1.

15. The kit of claim 14, wherein said agents are selected from primers and probes for determining presence or absence of one or more SNPs selected from the group consisting of SEQ ID NOs: 1 to 100.

16. The kit of claim 14, wherein said two or more SNPs are selected from the group consisting of 2, 3, 4, 5, 10, 15, 16, 18, 20, 30, 40, 50, 60, 70, 80, 90 or 100 SNPs.

17. A kit comprising
(a) one or more agents suitable for determining presence or absence of two or more SNPs selected from the group consisting of SEQ ID NOs: 1 to 100; and
(b) optionally a manual with instructions for performing the method claim 1, wherein said SNPs are the SNPs defined in claim 1.

18. (canceled)

19. A method of diagnosing a predisposition for or the occurrence of treatment emergent suicidal ideation in an individual, the method comprising determining the presence or absence of one or more SNPs selected from:
(a) one or more SNPs selected from the group consisting of SEQ ID NOs: 1 to 100;
(b) at least one tagging SNP as set forth in Table 4; or
(c) one or more SNPs selected from the group consisting of SEQ ID NOs: 1 to 100 and at least one tagging SNP as set forth in Table 4; and
in a sample obtained from a patient, wherein presence of the respective SNP(s) is/are indicative of said predisposition for or said occurrence of treatment emergent suicidal ideation.

20. A kit comprising
(a) one or more agents suitable for determining presence or absence of:
(i) two or more SNPs selected from the group consisting of SEQ ID NOs: 1 to 100;
(ii) at least one tagging SNP as set forth in Table 4; or
(iii) two or more SNPs selected from the group consisting of SEQ ID NOs: 1 to 100 and at least one tagging SNP as set forth in Table 4; and
(b) optionally a manual with instructions for performing the method claim 1.
